(19) United States
(12) Patent Application Publication
(10) Pub. No.: US 2009/0131268 A1
(43) Pub. Date: May 21, 2009

(54) Methods for Genotyping Polymorphisms

(75) Inventors: Paul Hardenbol, San Francisco, CA (US); Jonathan E. Forman, San Carlos, CA (US); George Karlin-Neumann, Palo Alto, CA (US); Xin Miao, Menlo Park, CA (US)

Correspondence Address: AFFYMETRIX, INC;ATTN: CHIEF IP COUNSEL, LEGAL DEPT., 3420 CENTRAL EXPRESSWAY, SANTA CLARA, CA, 95051, US

(73) Assignee: Affymetrix, Inc., Santa Clara, CA (US)

(21) Appl. No.: 12/211,103

(22) Filed: Sep. 15, 2008

Related U.S. Application Data
(60) Provisional application No. 60/972,548, filed on Sep. 14, 2007.

(51) Int. Cl. C40B 30/04

(52) U.S. Cl. 506/9

(57) ABSTRACT

The invention provides method for genotyping specific sets of polymorphisms in a single multiplex reaction. The polymorphisms are selected to be of interest in detecting genetic variation that alters individuals' metabolism, distribution, extretion and transport of pharmacological compounds. In preferred aspects the genotyping employs a multiplex hybridization-based assay. In some aspects combinations of methods are employed to allow the combination of polymorphisms to be interrogated. The invention also provides nucleic acid standards for validating the performance of such hybridization-based assays.

### RELATED APPLICATIONS

[0001] This application claims priority to U.S. Provisional Application No. 60/972,548 filed Sep. 14, 2007, the entire disclosure of which is incorporated herein by reference.

### FIELD OF THE INVENTION

[0002] The present invention relates to methods and compositions for predicting drug responses.

### BACKGROUND OF THE INVENTION

[0003] Single nucleotide polymorphisms (SNPs) have emerged as the marker of choice for genome wide association studies and genetic linkage studies. Building SNP maps of the genome will provide the framework for new studies to identify the underlying genetic basis of complex diseases such as cancer, mental illness and diabetes. Due to the wide ranging applications of SNPs there is still a need for the development of robust, flexible, cost-effective technology platforms that allow for scoring genotypes in large numbers of samples.

[0004] Many high throughput approaches for analyzing genetic processes and variation make use of complex mixtures of oligonucleotides to detect, sort, or manipulate gene products and/or genomic fragments, e.g. Brenner et al, Proc. Natl. Acad. Sci., 97: 1665-1670 (2000); Church et al, Science, 240: 185-188 (1988); Chee et al, Science, 274: 610-614 (1996); Shoemaker et al, Nature Genetics, 14: 450-456 (1996); Hardenbol et al, Nature Biotechnology, 21: 673-678 (2003); Kennedy et al, Nature Biotechnology, 21: 1233-1237 (2003); and the like. Such techniques are starting to be employed to genotype individuals to determine susceptibilities to a variety of conditions, including cancer, adverse drug reactions, responsiveness to targeted therapeutics, and the like, particularly in clinical trial settings. As these complex hybridization-based techniques move out of research laboratories and into medical and diagnostic applications, there will be a critical need to ensure that readouts based on the techniques are robust and valid, e.g. Food and Drug Administration, “Class II special controls guidance document: Instrumentation for clinical multiplex test systems,” Guidance for Industry and FDA Staff (Mar. 10, 2005).

[0005] When polymorphisms are closely spaced along a gene or genome, certain polymorphisms, particularly insertions or deletions, at one locus may interfere with the detection of a polymorphism at adjacent loci in hybridization-based assays because of anomalous hybridization and/or interference among probes. This situation makes it difficult to determine whether a lack of signal in a readout is due to the absence of a polymorphism, probe degradation, probe interference, or other problems, e.g. Landi et al, BioTechniques, 35: 816-827 (2003). The difficulty of such determinations is exacerbated when highly complex probes are used that comprise hundreds, or even thousands, of hybridizing components.

[0006] Such difficulties may be crucial when hybridization-based assays are used to genotype a large set of xenobiotic metabolizing genes to determine an effective dosage of a drug for a patient. Metabolism of xenobiotic substances, such as drugs, is a chemical process, by which the body structurally modifies foreign compounds to enhance their solubility and facilitate their excretion. This involves two distinct metabolic phases: enzymatic oxidation, reduction, and hydrolysis reactions, which expose or add functional groups to produce polar molecules (Phase I metabolism) and addition of endogenous compounds to the molecules to further increase polarity (Phase II metabolism). The bulk of responsibility for the Phase I reactions rests on the cytochrome P450 (CYP450) superfamily of enzymes. The CYP450 family consists of 60 to 100 different monoxygenases that catalyze the oxidative metabolism of lipophilic chemicals. These, together with several members of different families of transport proteins, play a crucial role in the disposition and elimination of a diverse array of therapeutic drugs and other xenobiotics. It is now well established that significant inter-individual variability exists in patient drug disposition and response. Much of the observed heterogeneity is thought to be due to the underlying genetic variation in the human population. Individual differences at a single nucleotide of DNA, otherwise known as single nucleotide polymorphisms (SNPs), are the most abundant source of genetic variation in humans. Many SNPs with potential for altering the activity of proteins involved in drug metabolism, such as the CYP450s have been found, e.g. Daly, Fundamental & Clinical Pharmacology, 17: 27-41 (2003). Phenotypes resulting from these genetic changes can markedly influence a drugs pharmacokinetics or change its efficacy and/or toxicity profile. Several examples exist where subjects carrying certain alleles suffer from a lack of drug efficacy, due to ultrarapid metabolism (UM) or, alternatively, adverse effects from the drug treatment due to impaired drug clearance by poor metabolism (PM). In current clinical practice, the suitability of a drug for a given individual is determined by trial and error. This practice places a significant burden on healthcare systems and costs. Having an accurate genetic profile of a patient's drug metabolizing genes would help ensure that the patient receives the most effective treatment, while avoiding inadvertent adverse drug reactions in poor metabolizers.

[0007] More than 3 billion prescriptions are written each year in the U.S. alone, effectively preventing or treating illness in hundreds of millions of people. But prescription medications also can cause powerful toxic effects in a patient. These effects are called adverse drug reactions (ADR). Adverse drug reactions can cause serious injury and or even death. Differences in the ways in which individuals utilize and eliminate drugs from their bodies are one of the most important causes of ADRs. Differences in metabolism also cause doses of drugs to be less effective than desired in some individuals.

[0008] A study performed in 1998 found that in the United States in the year 1994, more than 106,000 hospital patient deaths were attributed to serious adverse drug reactions or events (ADRs or ADEs) and an additional 2.2 million hospitalized patients had serious ADRs (Lazarou J, et al. JAMA 1998; 279:1200-5). Current estimates are that more than 200,000 Americans dies each year as a result of ADRs making ADRs one of the top 10 causes of death for Americans. Approximately seven percent of all hospital patients were affected by serious or fatal ADRs. ADRs are a severe, common and growing cause of death, disability and resource consumption.

[0009] It is estimated that drug-related anomalies account for nearly 10 percent of all hospital admissions. Drug-related morbidity and mortality in the U.S. is estimated to cost the U.S. health care system 177 billion in 2000, representing approximately 10% of total U.S. health care spending (Ernst and Grizzle, J Am Pharm Assoc 41(2):192-199, 2001.

[0010] Most prescription drugs are currently prescribed at standard doses in a “one size fits all” method. This “one size fits all” method, however, does not consider important genetic differences that give different individuals dramatically different abilities to metabolize and derive benefit from a particular drug. Improved methods for predicting an individual's response to a given drug or a particular dosage of a drug are needed.

### SUMMARY OF THE INVENTION

[0011] Methods for designing probes to optimize probe performance by taking into account local effects of the target sequence are disclosed. Local features that may be taken into consideration in probe design include insertions, deletions, secondary or interfering mutations, sequences immediately up or downstream of a variant to be detected, and sequence of complementary strands. For each target sequence a probe may be designed that is optimized for that sequence. Panels of probes may be combined that have different characteristics.

[0012] Specific collections of SNPs are disclosed. The SNPs have been selected for inclusion based on a variety of factors including frequency, presence in a gene reported in the literature to be involved in drug metabolism, excretion, transport, and distribution.

### BRIEF DESCRIPTION OF THE FIGURES

[0013] FIG. 1A shows the orientation of the probe 101 and the target 102

[0014] FIG. 1B shows a schematic of an embodiment that uses allele specific molecular inversion probes.

[0015] FIG. 2 shows one embodiment of inversion and amplification of a molecular inversion probe.

[0016] FIG. 3 shows a schematic for detection of an indel using molecular inversion probe technology. FIG. 3A shows the insertion allele and the deletion allele. 3B. shows probe design and 3C shows the possible outcomes for each probe and associated calls.

[0017] FIG. 4 shows two adjacent loci that are interfering.

### DETAILED DESCRIPTION OF THE INVENTION

### a) General

[0018] The present invention has many preferred embodiments and relies on many patents, applications and other references for details known to those of the art. Therefore, when a patent, application, or other reference is cited or repeated below, it should be understood that it is incorporated by reference in its entirety for all purposes as well as for the proposition that is recited.

[0019] As used in this application, the singular form “a,” “an,” and “the” include plural references unless the context clearly dictates otherwise. For example, the term “an agent” includes a plurality of agents, including mixtures thereof.

[0020] An individual is not limited to a human being but may also be other organisms including but not limited to mammals, plants, bacteria, or cells derived from any of the above.

[0021] Throughout this disclosure, various aspects of this invention can be presented in a range format. It should be understood that the description in range format is merely for convenience and brevity and should not be construed as an inflexible limitation on the scope of the invention. Accordingly, the description of a range should be considered to have specifically disclosed all the possible subranges as well as individual numerical values within that range. For example, description of a range such as from 1 to 6 should be considered to have specifically disclosed subranges such as from 1 to 3, from 1 to 4, from 1 to 5, from 2 to 4, from 2 to 6, from 3 to 6 etc., as well as individual numbers within that range, for example, 1, 2, 3, 4, 5, and 6. This applies regardless of the breadth of the range.

[0022] The practice of the present invention may employ, unless otherwise indicated, conventional techniques and descriptions of organic chemistry, polymer technology, molecular biology (including recombinant techniques), cell biology, biochemistry, and immunology, which are within the skill of the art. Such conventional techniques include polymer array synthesis, hybridization, ligation, and detection of hybridization using a label. Specific illustrations of suitable techniques can be had by reference to the example herein below. However, other equivalent conventional procedures can, of course, also be used. Such conventional techniques and descriptions can be found in standard laboratory manuals such as Genome Analysis: A Laboratory Manual Series (Vols. I-IV), Using Antibodies: A Laboratory Manual, Cells: A Laboratory Manual, PCR Primer: A Laboratory Manual, and Molecular Cloning: A Laboratory Manual (all from Cold Spring Harbor Laboratory Press), Stryer, L. (1995) Biochemistry (4th Ed.) Freeman, New York, Gait, “Oligonucleotide Synthesis: A Practical Approach” 1984, IRL Press, London, Nelson and Cox (2000), Lehninger, Principles of Biochemistry 3^{rd} Ed., W.H. Freeman Pub., New York, N.Y. and Berg et al. (2002) Biochemistry, 5^{th} Ed., W.H. Freeman Pub., New York, N.Y., all of which are herein incorporated in their entirety by reference for all purposes.

[0023] The present invention can employ solid substrates, including arrays in some preferred embodiments. Methods and techniques applicable to polymer (including protein) array synthesis have been described in U.S. Ser. No. 09/536,841, WO 00/58516, U.S. Pat. Nos. 5,143,854, 5,242,974, 5,252,743, 5,324,633, 5,384,261, 5,405,783, 5,424,186, 5,451,683, 5,482,867, 5,491,074, 5,527,681, 5,550,215, 5,571,639, 5,578,832, 5,593,839, 5,599,695, 5,624,711, 5,631,734, 5,795,716, 5,831,070, 5,837,832, 5,856,101, 5,858,659, 5,936,324, 5,968,740, 5,974,164, 5,981,185, 5,981,956, 6,025,601, 6,033,860, 6,040,193, 6,090,555, 6,136,269, 6,269,846 and 6,428,752, in PCT Applications Nos. PCT/US99/00730 (International Publication No. WO 99/36760) and PCT/US01/04285 (International Publication No. WO 01/58593), which are all incorporated herein by reference in their entirety for all purposes.

[0024] Patents that describe synthesis techniques in specific embodiments include U.S. Pat. Nos. 5,412,087, 6,147,205, 6,262,216, 6,310,189, 5,889,165, and 5,959,098. Nucleic acid arrays are described in many of the above patents, but the same techniques are applied to polypeptide arrays.

[0025] Nucleic acid arrays that are useful in the present invention include those that are commercially available from Affymetrix (Santa Clara, Calif.) under the brand name GeneChip™. Example arrays are shown on the website at affymetrix.com.

[0026] The present invention also contemplates many uses for polymers attached to solid substrates. These uses include gene expression monitoring, profiling, library screening, genotyping and diagnostics. Gene expression monitoring and profiling methods can be shown in U.S. Pat. Nos. 5,800,992, 6,013,449, 6,020,135, 6,033,860, 6,040,138, 6,177,248 and 6,309,822. Genotyping and uses therefore are shown in U.S. Ser. Nos. 10/442,021, 10/013,598 (U.S. Patent Application Publication 20030036069), and U.S. Pat. Nos. 5,856,092, 6,300,063, 5,858,659, 6,284,460, 6,361,947, 6,368,799 and 6,333,179. Other uses are embodied in U.S. Pat. Nos. 5,871,928, 5,902,723, 6,045,996, 5,541,061, and 6,197,506.

[0027] The present invention also contemplates sample preparation methods in certain preferred embodiments. Prior to or concurrent with genotyping, the genomic sample may be amplified by a variety of mechanisms, some of which may employ PCR. See, for example, PCR Technology: Principles and Applications for DNA Amplification (Ed. H. A. Erlich, Freeman Press, NY, N.Y., 1992); PCR Protocols: A Guide to Methods and Applications (Eds. Innis, et al., Academic Press, San Diego, Calif., 1990); Mattila et al., Nucleic Acids Res. 19, 4967 (1991); Eckert et al., PCR Methods and Applications 1, 17 (1991); PCR (Eds. McPherson et al., IRL Press, Oxford); and U.S. Pat. Nos. 4,683,202, 4,683,195, 4,800,159 4,965,188, and 5,333,675, and each of which is incorporated herein by reference in their entireties for all purposes. The sample may be amplified on the array. See, for example, U.S. Pat. No. 6,300,070 and U.S. Ser. No. 09/513,300, which are incorporated herein by reference.

[0028] Other suitable amplification methods include the ligase chain reaction (LCR) (for example, Wu and Wallace, Genomics 4, 560 (1989), Landegren et al., Science 241, 1077 (1988) and Barringer et al. Gene 89:117 (1990)), transcription amplification (Kwoh et al., Proc. Natl. Acad. Sci. USA 86, 1173 (1989) and WO88/10315), self-sustained sequence replication (Guatelli et al., Proc. Nat. Acad. Sci. USA, 87, 1874 (1990) and WO90/06995), selective amplification of target polynucleotide sequences (U.S. Pat. No. 6,410,276), consensus sequence primed polymerase chain reaction (CP-PCR) (U.S. Pat. No. 4,437,975), arbitrarily primed polymerase chain reaction (AP-PCR) (U.S. Pat. Nos. 5,413,909, 5,861,245) and nucleic acid based sequence amplification (NABSA). (See, U.S. Pat. Nos. 5,409,818, 5,554,517, and 6,063,603, each of which is incorporated herein by reference). Other amplification methods that may be used are described in, U.S. Pat. Nos. 5,242,794, 5,494,810, 4,988,617 and in U.S. Ser. No. 09/854,317, each of which is incorporated herein by reference.

[0029] Additional methods of sample preparation and techniques for reducing the complexity of a nucleic sample are described in Dong et al., Genome Research 11, 1418 (2001), in U.S. Pat. Nos. 6,361,947, 6,391,592 and U.S. Ser. Nos. 09/916,135, 09/920,491 (U.S. Patent Application Publication 20030096235), 09/910,292 (U.S. Patent Application Publication 20030082543), and 10/013,598.

[0030] Methods for conducting polynucleotide hybridization assays have been well developed in the art. Hybridization assay procedures and conditions will vary depending on the application and are selected in accordance with the general binding methods known including those referred to in: Maniatis et al. Molecular Cloning: A Laboratory Manual (2^{nd} Ed. Cold Spring Harbor, N.Y, 1989); Berger and Kimmel Methods in Enzymology, Vol. 152, Guide to Molecular Cloning Techniques (Academic Press, Inc., San Diego, Calif., 1987); Young and Davism, P.N.A.S, 80: 1194 (1983). Methods and apparatus for carrying out repeated and controlled hybridization reactions have been described in U.S. Pat. Nos. 5,871,928, 5,874,219, 6,045,996 and 6,386,749, 6,391,623 each of which are incorporated herein by reference

[0031] The present invention also contemplates signal detection of hybridization between ligands in certain preferred embodiments. See U.S. Pat. Nos. 5,143,854, 5,578,832; 5,631,734; 5,834,758; 5,936,324; 5,981,956; 6,025,601; 6,141,096; 6,185,030; 6,201,639; 6,218,803; and 6,225,625, in U.S. Ser. No. 10/389,194 and in PCT Application PCT/US99/06097 (published as WO99/47964), each of which also is hereby incorporated by reference in its entirety for all purposes.

[0032] Methods and apparatus for signal detection and processing of intensity data are disclosed in, for example, U.S. Pat. Nos. 5,143,854, 5,547,839, 5,578,832, 5,631,734, 5,800,992, 5,834,758; 5,856,092, 5,902,723, 5,936,324, 5,981,956, 6,025,601, 6,090,555, 6,141,096, 6,185,030, 6,201,639; 6,218,803; and 6,225,625, in U.S. Ser. Nos. 10/389,194, 60/493,495 and in PCT Application PCT/US99/06097 (published as WO99/47964), each of which also is hereby incorporated by reference in its entirety for all purposes.

[0033] The practice of the present invention may also employ conventional biology methods, software and systems. Computer software products of the invention typically include computer readable medium having computer-executable instructions for performing the logic steps of the method of the invention. Suitable computer readable medium include floppy disk, CD-ROM/DVD/DVD-ROM, hard-disk drive, flash memory, ROM/RAM, magnetic tapes and etc. The computer executable instructions may be written in a suitable computer language or combination of several languages. Basic computational biology methods are described in, for example Setubal and Meidanis et al., Introduction to Computational Biology Methods (PWS Publishing Company, Boston, 1997); Salzberg, Searles, Kasif, (Ed.), Computational Methods in Molecular Biology, (Elsevier, Amsterdam, 1998); Rashidi and Buehler, Bioinformatics Basics: Application in Biological Science and Medicine (CRC Press, London, 2000) and Ouelette and Bzevanis Bioinformatics: A Practical Guide for Analysis of Gene and Proteins (Wiley & Sons, Inc., 2^{nd} ed., 2001). See U.S. Pat. No. 6,420,108.

[0034] The present invention may also make use of various computer program products and software for a variety of purposes, such as probe design, management of data, analysis, and instrument operation. See, U.S. Pat. Nos. 5,593,839, 5,795,716, 5,733,729, 5,974,164, 6,066,454, 6,090,555, 6,185,561, 6,188,783, 6,223,127, 6,229,911 and 6,308,170.

[0035] Additionally, the present invention may have preferred embodiments that include methods for providing genetic information over networks such as the Internet as shown in U.S. Ser. Nos. 10/197,621, 10/063,559 (United States Publication Number 20020183936), 10/065,856, 10/065,868, 10/328,818, 10/328,872, 10/423,403, and 60/482,389.

### b) Definitions

[0036] “Addressable” in reference to tag complements means that the nucleotide sequence, or perhaps other physical or chemical characteristics, of an end-attached probe, such as a tag complement, can be determined from its address, i.e. a one-to-one correspondence between the sequence or other property of the end-attached probe and a spatial location on, or characteristic of, the solid phase support to which it is attached. Preferably, an address of a tag complement is a spatial location, e.g. the planar coordinates of a particular region containing copies of the end-attached probe. However, end-attached probes may be addressed in other ways too, e.g. by microparticle size, shape, color, frequency of micro-transponder, or the like, e.g. Chandler et al, PCT publication WO 97/14028.

[0037] The term “allele’ as used herein is any one of a number of alternative forms a given locus (position) on a chromosome. An allele may be used to indicate one form of a polymorphism, for example, a biallelic SNP may have possible alleles A and B. An allele may also be used to indicate a particular combination of alleles of two or more SNPs in a given gene or chromosomal segment. The frequency of an allele in a population is the number of times that specific allele appears divided by the total number of alleles of that locus.

[0038] “Amplicon” means the product of a polynucleotide amplification reaction. That is, it is a population of polynucleotides, usually double stranded, that are replicated from one or more starting sequences. The one or more starting sequences may be one or more copies of the same sequence, or it may be a mixture of different sequences. Amplicons may be produced by a variety of amplification reactions whose products are multiple replicates of one or more target nucleic acids. Generally, amplification reactions producing amplicons are “template-driven” in that base pairing of reactants, either nucleotides or oligonucleotides, have complements in a template polynucleotide that are required for the creation of reaction products. In one aspect, template-driven reactions are primer extensions with a nucleic acid polymerase or oligonucleotide ligations with a nucleic acid ligase. Such reactions include, but are not limited to, polymerase chain reactions (PCRs), linear polymerase reactions, nucleic acid sequence-based amplification (NASBAs), rolling circle amplifications, and the like, disclosed in the following references that are incorporated herein by reference: Mullis et al, U.S. Pat. Nos. 4,683,195; 4,965,188; 4,683,202; 4,800,159 (PCR); Gelfand et al, U.S. Pat. No. 5,210,015 (real-time PCR with “taqman” probes); Wittwer et al, U.S. Pat. No. 6,174,670; Kacian et al, U.S. Pat. No. 5,399,491 (“NASBA”); Lizardi, U.S. Pat. No. 5,854,033; Aono et al, Japanese patent publ. JP 4-262799 (rolling circle amplification); and the like. In one aspect, amplicons of the invention are produced by PCRs. An amplification reaction may be a “real-time” amplification if a detection chemistry is available that permits a reaction product to be measured as the amplification reaction progresses, e.g. “real-time PCR” described below, or “real-time NASBA” as described in Leone et al, Nucleic Acids Research, 26: 2150-2155 (1998), and like references. As used herein, the term “amplifying” means performing an amplification reaction. A “reaction mixture” means a solution containing all the necessary reactants for performing a reaction, which may include, but not be limited to, buffering agents to maintain pH at a selected level during a reaction, salts, co-factors, scavengers, and the like.

[0039] “Complementary or substantially complementary” refers to the hybridization or base pairing or the formation of a duplex between nucleotides or nucleic acids, such as, for instance, between the two strands of a double stranded DNA molecule or between an oligonucleotide primer and a primer binding site on a single stranded nucleic acid. Complementary nucleotides are, generally, A and T (or A and U), or C and G. Two single stranded RNA or DNA molecules are said to be substantially complementary when the nucleotides of one strand, optimally aligned and compared and with appropriate nucleotide insertions or deletions, pair with at least about 80% of the nucleotides of the other strand, usually at least about 90% to 95%, and more preferably from about 98 to 100%. Alternatively, substantial complementarity exists when an RNA or DNA strand will hybridize under selective hybridization conditions to its complement. Typically, selective hybridization will occur when there is at least about 65% complementary over a stretch of at least 14 to 25 nucleotides, preferably at least about 75%, more preferably at least about 90% complementary. See, M. Kanehisa Nucleic Acids Res. 12:203 (1984), incorporated herein by reference. [0016] “Duplex” means at least two oligonucleotides and/or polynucleotides that are fully or partially complementary undergo Watson-Crick type base pairing among all or most of their nucleotides so that a stable complex is formed. The terms “annealing” and “hybridization” are used interchangeably to mean the formation of a stable duplex. In one aspect, stable duplex means that a duplex structure is not destroyed by a stringent wash, e.g. conditions including temperature of about 5.degree. C. less that the T.sub.m of a strand of the duplex and low monovalent salt concentration, e.g. less than 0.2 M, or less than 0.1 M. “Perfectly matched” in reference to a duplex means that the poly- or oligonucleotide strands making up the duplex form a double stranded structure with one another such that every nucleotide in each strand undergoes Watson-Crick basepairing with a nucleotide in the other strand. The term “duplex” comprehends the pairing of nucleoside analogs, such as deoxyinosine, nucleosides with 2-aminopurine bases, PNAs, and the like, that may be employed. A “mismatch” in a duplex between two oligonucleotides or polynucleotides means that a pair of nucleotides in the duplex fails to undergo Watson-Crick bonding.

[0040] “Genetic locus,” or “locus” in reference to a genome or target polynucleotide, means a contiguous subregion or segment of the genome or target polynucleotide. As used herein, genetic locus, or locus, may refer to the position of a nucleotide, a gene, or a portion of a gene in a genome, including mitochondrial DNA, or it may refer to any contiguous portion of genomic sequence whether or not it is within, or associated with, a gene. In one aspect, a genetic locus refers to any portion of genomic sequence, including mitochondrial DNA, from a single nucleotide to a segment of few hundred nucleotides, e.g. 100-300, in length. Usually, a particular genetic locus may be identified by its nucleotide sequence, or the nucleotide sequence, or sequences, of one or both adjacent or flanking regions.

[0041] The term “genome” as used herein is all the genetic material in the chromosomes of an organism. DNA derived from the genetic material in the chromosomes of a particular organism is genomic DNA. A genomic library is a collection of clones made from a set of randomly generated overlapping DNA fragments representing the entire genome of an organism.

[0042] The term “genotype” as used herein refers to the genetic information an individual carries at one or more positions in the genome. A genotype may refer to the information present at a single polymorphism, for example, a single SNP. For example, if a SNP is biallelic and can be either an A or a C then if an individual is homozygous for A at that position the genotype of the SNP is homozygous A or AA. Genotype may also refer to the information present at a plurality of polymorphic positions.

[0043] The term “Hardy-Weinberg equilibrium” (HWE) as used herein refers to the principle that an allele that when homozygous leads to a disorder that prevents the individual from reproducing does not disappear from the population but remains present in a population in the undetectable heterozygous state at a constant allele frequency.

[0044] “Hybridization” refers to the process in which two single-stranded polynucleotides bind non-covalently to form a stable double-stranded polynucleotide. The term “hybridization” may also refer to triple-stranded hybridization. The resulting (usually) double-stranded polynucleotide is a “hybrid” or “duplex.” “Hybridization conditions” will typically include salt concentrations of less than about 1M, more usually less than about 500 mM and less than about 200 mM. Hybridization temperatures can be as low as 5.degree. C., but are typically greater than 22.degree. C., more typically greater than about 30.degree. C., and preferably in excess of about 37.degree. C. Hybridizations are usually performed under stringent conditions, i.e. conditions under which a probe will hybridize to its target subsequence. Stringent conditions are sequence-dependent and are different in different circumstances. Longer fragments may require higher hybridization temperatures for specific hybridization. As other factors may affect the stringency of hybridization, including base composition and length of the complementary strands, presence of organic solvents and extent of base mismatching, the combination of parameters is more important than the absolute measure of any one alone. Generally, stringent conditions are selected to be about 5.degree. C. lower than the T.sub.m for the specific sequence at s defined ionic strength and pH. Exemplary stringent conditions include salt concentration of at least 0.01 M to no more than 1 M Na ion concentration (or other salts) at a pH 7.0 to 8.3 and a temperature of at least 25.degree. C. For example, conditions of 5.times.SSPE (750 mM NaCl, 50 mM NaPhosphate, 5 mM EDTA, pH 7.4) and a temperature of 25-30.degree. C. are suitable for allele-specific probe hybridizations. For stringent conditions, see for example, Sambrook, Fritsche and Maniatis. “Molecular Cloning A laboratory Manual” 2.sup.nd Ed. Cold Spring Harbor Press (1989) and Anderson “Nucleic Acid Hybridization” 1.sup.st Ed., BIOS Scientific Publishers Limited (1999), which are hereby incorporated by reference in its entirety for all purposes above. “Hybridizing specifically to” or “specifically hybridizing to” or like expressions refer to the binding, duplexing, or hybridizing of a molecule substantially to or only to a particular nucleotide sequence or sequences under stringent conditions when that sequence is present in a complex mixture (e.g., total cellular) DNA or RNA.

[0045] “Hybridization-based assay” means any assay that relies on the formation of a stable duplex or triplex between a probe and a target nucleotide sequence for detecting or measuring such a sequence. In one aspect, probes of such assays anneal to (or form duplexes with) regions of target sequences in the range of from 8 to 100 nucleotides; or in other aspects, they anneal to target sequences in the range of from 8 to 40 nucleotides, or more usually, in the range of from 8 to 20 nucleotides. A “probe” in reference to a hybridization-based assay mean a polynucleotide that has a sequence that is capable of forming a stable hybrid (or triplex) with its complement in a target nucleic acid and that is capable of being detected, either directly or indirectly. Hybridization-based assays include, without limitation, assays based on use of oligonucleotides, such as polymerase chain reactions, NASBA reactions, oligonucleotide ligation reactions, single-base extensions of primers, circularizable probe reactions, allele-specific oligonucleotides hybridizations, either in solution phase or bound to solid phase supports, such as microarrays or microbeads. There is extensive guidance in the literature on hybridization-based assays, e.g. Hames et al, editors, Nucleic Acid Hybridization a Practical Approach (IRL Press, Oxford, 1985); Tijssen, Hybridization with Nucleic Acid Probes, Parts I & II (Elsevier Publishing Company, 1993); Hardiman, Microarray Methods and Applications (DNA Press, 2003); Schena, editor, DNA Microarrays a Practical Approach (IRL Press, Oxford, 1999); and the like. In one aspect, hybridization-based assays are solution phase assays; that is, both probes and target sequences hybridize under conditions that are substantially free of surface effects or influences on reaction rate. A solution phase assay may include circumstance where either probes or target sequences are attached to microbeads.

[0046] “Interfering polymorphic loci” mean closely spaced loci having sequence variants, or alleles, usually insertions, detections, or substitutions, that are sought to be determined by a hybridization-based assay. In one aspect, interfering polymorphic loci are a pair of closely spaced loci in which at least one locus of the pair contains two or more alternative forms, each having a characteristic sequence, such that the presence of at least one characteristic sequence destabilizes a probe specific for the other locus of the pair on the same DNA strand. Characteristic sequences of alleles may be identified in conventional databases, e.g. dbSNP, or the like. The region of a target polynucleotide or genome that interfering polymorphic loci span depends in part on the nature of the probes employed in a hybridization-based assay. Thus, in one aspect, members of a pair of interfering polymorphic loci are within 40 nucleotides of one another; or in another aspect such members may be within 20 nucleotides of one another.

[0047] “Kit” refers to any delivery system for delivering materials or reagents for carrying out a method of the invention. In the context of assays, such delivery systems include systems that allow for the storage, transport, or delivery of reaction reagents (e.g., probes, enzymes, etc. in the appropriate containers) and/or supporting materials (e.g., buffers, written instructions for performing the assay etc.) from one location to another. For example, kits include one or more enclosures (e.g., boxes) containing the relevant reaction reagents and/or supporting materials for assays of the invention. In one aspect, kits of the invention comprise probes specific for interfering polymorphic loci. In another aspect, kits comprise nucleic acid standards for validating the performance of probes specific for interfering polymorphic loci. Such contents may be delivered to the intended recipient together or separately. For example, a first container may contain an enzyme for use in an assay, while a second container contains probes.

[0048] “Ligation” means to form a covalent bond or linkage between the termini of two or more nucleic acids, e.g. oligonucleotides and/or polynucleotides, in a template-driven reaction. The nature of the bond or linkage may vary widely and the ligation may be carried out enzymatically or chemically. As used herein, ligations are usually carried out enzymatically to form a phosphodiester linkage between a 5′ carbon of a terminal nucleotide of one oligonucleotide with 3′ carbon of another oligonucleotide. A variety of template-driven ligation reactions are described in the following references, which are incorporated by reference: Whitely et al, U.S. Pat. No. 4,883,750; Letsinger et al, U.S. Pat. No. 5,476,930; Fung et al, U.S. Pat. No. 5,593,826; Kool, U.S. Pat. No. 5,426,180; Landegren et al, U.S. Pat. No. 5,871,921; Xu and Kool, Nucleic Acids Research, 27: 875-881 (1999); Higgins et al, Methods in Enzymology, 68: 50-71 (1979); Engler et al, The Enzymes, 15: 3-29 (1982); and Namsaraev, U.S. patent publication 2004/0110213.

[0049] The term “linkage analysis” as used herein refers to a method of genetic analysis in which data are collected from affected families, and regions of the genome are identified that co-segregated with the disease in many independent families or over many generations of an extended pedigree. A disease locus may be identified because it lies in a region of the genome that is shared by all affected members of a pedigree. Methods of performing linkage analysis are disclosed, for example, in Sellick et al, Diabetes 52:2636-38 (2003), Sellick et al., Nucleic Acids Res., 32:e164 (2004), and Janecke et al., Nat. Genet., 36:850-4 (2004).

[0050] The term “linkage disequilibrium” or sometimes referred to as “allelic association” as used herein refers to the preferential association of a particular allele or genetic marker with a specific allele, or genetic marker at a nearby chromosomal location more frequently than expected by chance for any particular allele frequency in the population. For example, if locus X has alleles A and B, which occur equally frequently, and linked locus Y has alleles C and D, which occur equally frequently, one would expect the combination AC to occur with a frequency of 0.25. If AC occurs more frequently, then alleles A and C are in linkage disequilibrium. Linkage disequilibrium may result from natural selection of certain combination of alleles or because an allele has been introduced into a population too recently to have reached equilibrium with linked alleles. The genetic interval around a disease locus may be narrowed by detecting disequilibrium between nearby markers and the disease locus. For additional information on linkage disequilibrium see Ardlie et al, Nat. Rev. Gen. 3:299-309, 2002. Methods of performing genome wide association studies are disclosed, for example, in Hu et al., Cancer Res. 65:2542-6 (2005), Mitra et al., Cancer Res. 64:8116-25 (2004), Klein et al., Science 308:385-9 (2005) and Godde et al., J. Mol. Med. 83:486-94 (2005).

[0051] “Microarray” or “array” refers to a solid phase support having a planar surface, which carries an array of nucleic acids, each member of the array comprising identical copies of an oligonucleotide or polynucleotide immobilized to a spatially defined region or site, which does not overlap with those of other members of the array; that is, the regions or sites are spatially discrete. Spatially defined hybridization sites may additionally be “addressable” in that its location and the identity of its immobilized oligonucleotide are known or predetermined, for example, prior to its use. Typically, the oligonucleotides or polynucleotides are single stranded and are covalently attached to the solid phase support, usually by a 5′-end or a 3′-end. The density of non-overlapping regions containing nucleic acids in a microarray is typically greater than 100 per cm.sup.2, and more preferably, greater than 1000 per cm.sup.2. Microarray technology is reviewed in the following references: Schena, Editor, Microarrays: A Practical Approach (IRL Press, Oxford, 2000); Southern, Current Opin. Chem. Biol., 2: 404-410 (1998); Nature Genetics Supplement, 21: 1-60 (1999). As used herein, “random microarray” refers to a microarray whose spatially discrete regions of oligonucleotides or polynucleotides are not spatially addressed. That is, the identity of the attached oligonucleoties or polynucleotides is not discernable, at least initially, from its location. In one aspect, random microarrays are planar arrays of microbeads wherein each microbead has attached a single kind of hybridization tag complement, such as from a minimally cross-hybridizing set of oligonucleotides. Arrays of microbeads may be formed in a variety of ways, e.g. Brenner et al, Nature Biotechnology, 18: 630-634 (2000); Tulley et al, U.S. Pat. No. 6,133,043; Stuelpnagel et al, U.S. Pat. No. 6,396,995; Chee et al, U.S. Pat. No. 6,544,732; and the like. Likewise, after formation, microbeads, or oligonucleotides thereof, in a random array may be identified in a variety of ways, including by optical labels, e.g. fluorescent dye ratios or quantum dots, shape, sequence analysis, or the like. The term “nucleic acids” as used herein may include any polymer or oligomer of pyrimidine and purine bases, preferably cytosine, thymine, and uracil, and adenine and guanine, respectively. See Albert L. Lehninger, PRINCIPLES OF BIOCHEMISTRY, at 793-800 (Worth Pub. 1982). Indeed, the present invention contemplates any deoxyribonucleotide, ribonucleotide or peptide nucleic acid component, and any chemical variants thereof, such as methylated, hydroxymethylated or glucosylated forms of these bases, and the like. The polymers or oligomers may be heterogeneous or homogeneous in composition, and may be isolated from naturally-occurring sources or may be artificially or synthetically produced. In addition, the nucleic acids may be DNA or RNA, or a mixture thereof, and may exist permanently or transitionally in single-stranded or double-stranded form, including homoduplex, heteroduplex, and hybrid states.

[0052] “Nucleoside” as used herein includes the natural nucleosides, including 2′-deoxy and 2′-hydroxyl forms, e.g. as described in Kornberg and Baker, DNA Replication, 2nd Ed. (Freeman, San Francisco, 1992). “Analogs” in reference to nucleosides includes synthetic nucleosides having modified base moieties and/or modified sugar moieties, e.g. described by Scheit, Nucleotide Analogs (John Wiley, New York, 1980); Uhlman and Peyman, Chemical Reviews, 90: 543-584 (1990), or the like, with the proviso that they are capable of specific hybridization. Such analogs include synthetic nucleosides designed to enhance binding properties, reduce complexity, increase specificity, and the like. Polynucleotides comprising analogs with enhanced hybridization or nuclease resistance properties are described in Uhlman and Peyman (cited above); Crooke et al, Exp. Opin. Ther. Patents, 6: 855-870 (1996); Mesmaeker et al, Current Opinion in Structural Biology, 5: 343-355 (1995); and the like. Exemplary types of polynucleotides that are capable of enhancing duplex stability include oligonucleotide N3′.fwdarw.P5′ phosphoramidates (referred to herein as “amidates”), peptide nucleic acids (referred to herein as “PNAs”), oligo-2′-O-alkylribonucleotides, polynucleotides containing C-5 propynylpyrimidines, locked nucleic acids (LNAs), and like compounds. Such oligonucleotides are either available commercially or may be synthesized using methods described in the literature.

[0053] The term “oligonucleotide” or sometimes refer by “polynucleotide” as used herein refers to a nucleic acid ranging from at least 2, preferable at least 8, and more preferably at least 20 nucleotides in length or a compound that specifically hybridizes to a polynucleotide. Polynucleotides of the present invention include sequences of deoxyribonucleic acid (DNA) or ribonucleic acid (RNA) which may be isolated from natural sources, recombinantly produced or artificially synthesized and mimetics thereof. A further example of a polynucleotide of the present invention may be peptide nucleic acid (PNA). The invention also encompasses situations in which there is a nontraditional base pairing such as Hoogsteen base pairing which has been identified in certain tRNA molecules and postulated to exist in a triple helix. “Polynucleotide” and “oligonucleotide” are used interchangeably in this application.

[0054] Pharmacogenomics is the study of the relationship between an individual's genotype and that individual's response to a foreign compound or drug. Differences in metabolism of therapeutics can lead to severe toxicity or therapeutic failure by altering the relation between dose and blood concentration of the pharmacologically active drug. Thus, a physician or clinician may consider applying knowledge obtained in relevant pharmacogenomics studies in determining the type of drug and dosage and/or therapeutic regimen of treatment.

[0055] Pharmacogenomics deals with clinically significant hereditary variations in the response to drugs due to altered drug disposition and abnormal action in affected persons. See, for example, Eichelbaum, M. et al. (1996) Clin. Exp. Pharmacol. Physiol. 23(1-11):983-985 and Linder, M. W. et al. (1997) Clin. Chem. 43(2):254-266. In general, two types of pharmacogenetic conditions can be differentiated. Genetic conditions transmitted as a single factor altering the way drugs act on the body (altered drug action) or genetic conditions transmitted as single factors altering the way the body acts on drugs (altered drug metabolism). These pharmacogenetic conditions can occur either as rare genetic defects or as naturally-occurring polymorphisms. For example, glucose-6-phosphate dehydrogenase deficiency (G6PD) is a common inherited enzymopathy in which the main clinical complication is haemolysis after ingestion of oxidant drugs (anti-malarials, sulfonamides, analgesics, nitrofarans) and consumption of fava beans. Thus, it would be highly desirable to dispose of fast and cheap methods for determining a subject's genotype so as to predict the best treatment.

[0056] “Polymerase chain reaction,” or “PCR,” means a reaction for the in vitro amplification of specific DNA sequences by the simultaneous primer extension of complementary strands of DNA. In other words, PCR is a reaction for making multiple copies or replicates of a target nucleic acid flanked by primer binding sites, such reaction comprising one or more repetitions of the following steps: (i) denaturing the target nucleic acid, (ii) annealing primers to the primer binding sites, and (iii) extending the primers by a nucleic acid polymerase in the presence of nucleoside triphosphates. Usually, the reaction is cycled through different temperatures optimized for each step in a thermal cycler instrument. Particular temperatures, durations at each step, and rates of change between steps depend on many factors well-known to those of ordinary skill in the art, e.g. exemplified by the references: McPherson et al, editors, PCR: A Practical Approach and PCR2: A Practical Approach (IRL Press, Oxford, 1991 and 1995, respectively). For example, in a conventional PCR using Taq DNA polymerase, a double stranded target nucleic acid may be denatured at a temperature >90.degree. C., primers annealed at a temperature in the range 50-75.degree. C., and primers extended at a temperature in the range 72-78.degree. C. The term “PCR” encompasses derivative forms of the reaction, including but not limited to, RT-PCR, real-time PCR, nested PCR, quantitative PCR, multiplexed PCR, and the like. Reaction volumes range from a few hundred nanoliters, e.g. 200 mL, to a few hundred .mu.L, e.g. 200 .mu.L. “Reverse transcription PCR,” or “RT-PCR,” means a PCR that is preceded by a reverse transcription reaction that converts a target RNA to a complementary single stranded DNA, which is then amplified, e.g. Tecott et al, U.S. Pat. No. 5,168,038, which patent is incorporated herein by reference. “Real-time PCR” means a PCR for which the amount of reaction product, i.e. amplicon, is monitored as the reaction proceeds. There are many forms of real-time PCR that differ mainly in the detection chemistries used for monitoring the reaction product, e.g. Gelfand et al, U.S. Pat. No. 5,210,015 (“taqman”); Wittwer et al, U.S. Pat. Nos. 6,174,670 and 6,569,627 (intercalating dyes); Tyagi et al, U.S. Pat. No. 5,925,517 (molecular beacons); which patents are incorporated herein by reference. Detection chemistries for real-time PCR are reviewed in Mackay et al, Nucleic Acids Research, 30: 1292-1305 (2002), which is also incorporated herein by reference. “Nested PCR” means a two-stage PCR wherein the amplicon of a first PCR becomes the sample for a second PCR using a new set of primers, at least one of which binds to an interior location of the first amplicon. As used herein, “initial primers” in reference to a nested amplification reaction mean the primers used to generate a first amplicon, and “secondary primers” mean the one or more primers used to generate a second, or nested, amplicon. “Multiplexed PCR” means a PCR wherein multiple target sequences (or a single target sequence and one or more reference sequences) are simultaneously carried out in the same reaction mixture, e.g. Bernard et al, Anal. Biochem., 273: 221-228 (1999) (two-color real-time PCR). Usually, distinct sets of primers are employed for each sequence being amplified. “Quantitative PCR” means a PCR designed to measure the abundance of one or more specific target sequences in a sample or specimen. Quantitative PCR includes both absolute quantitation and relative quantitation of such target sequences. Quantitative measurements are made using one or more reference sequences that may be assayed separately or together with a target sequence. The reference sequence may be endogenous or exogenous to a sample or specimen, and in the latter case, may comprise one or more competitor templates. Typical endogenous reference sequences include segments of transcripts of the following genes: .beta.-actin, GAPDH, .beta.sub.2-microglobulin, ribosomal RNA, and the like. Techniques for quantitative PCR are well-known to those of ordinary skill in the art, as exemplified in the following references that are incorporated by reference: Freeman et al, Biotechniques, 26: 112-126 (1999); Becker-Andre et al, Nucleic Acids Research, 17: 9437-9447 (1989); Zimmerman et al, Biotechniques, 21: 268-279 (1996); Diviacco et al, Gene, 122: 3013-3020 (1992); Becker-Andre et al, Nucleic Acids Research, 17: 9437-9446 (1989); and the like.

[0057] “Polymorphism” or “genetic variant” means a substitution, inversion, insertion, or deletion of one or more nucleotides at a genetic locus, or a translocation of DNA from one genetic locus to another genetic locus. In one aspect, polymorphism means one of multiple alternative nucleotide sequences that may be present at a genetic locus of an individual and that may comprise a nucleotide substitution, insertion, or deletion with respect to other sequences at the same locus in the same individual, or other individuals within a population. An individual may be homozygous or heterozygous at a genetic locus; that is, an individual may have the same nucleotide sequence in both alleles, or have a different nucleotide sequence in each allele, respectively. In one aspect, insertions or deletions at a genetic locus comprises the addition or the absence of from 1 to 10 nucleotides at such locus, in comparison with the same locus in another individual of a population (or another allele in the same individual). Usually, insertions or deletions are with respect to a major allele at a locus within a population, e.g. an allele present in a population at a frequency of fifty percent or greater.

[0058] “Polynucleotide” or “oligonucleotide” are used interchangeably and each mean a linear polymer of nucleotide monomers. Monomers making up polynucleotides and oligonucleotides are capable of specifically binding to a natural polynucleotide by way of a regular pattern of monomer-to-monomer interactions, such as Watson-Crick type of base pairing, base stacking, Hoogsteen or reverse Hoogsteen types of base pairing, or the like. Such monomers and their internucleosidic linkages may be naturally occurring or may be analogs thereof, e.g. naturally occurring or non-naturally occurring analogs. Non-naturally occurring analogs may include PNAs, phosphorothioate internucleosidic linkages, bases containing linking groups permitting the attachment of labels, such as fluorophores, or haptens, and the like. Whenever the use of an oligonucleotide or polynucleotide requires enzymatic processing, such as extension by a polymerase, ligation by a ligase, or the like, one of ordinary skill would understand that oligonucleotides or polynucleotides in those instances would not contain certain analogs of internucleosidic linkages, sugar moities, or bases at any or some positions. Polynucleotides typically range in size from a few monomeric units, e.g. 5-40, when they are usually referred to as “oligonucleotides,” to several thousand monomeric units. Whenever a polynucleotide or oligonucleotide is represented by a sequence of letters (upper or lower case), such as “ATGCCTG,” it will be understood that the nucleotides are in 5′.fwdarw.3′ order from left to right and that “A” denotes deoxyadenosine, “C” denotes deoxycytidine, “G” denotes deoxyguanosine, and “T” denotes thymidine, “I” denotes deoxyinosine, “U” denotes uridine, unless otherwise indicated or obvious from context. Unless otherwise noted the terminology and atom numbering conventions will follow those disclosed in Strachan and Read, Human Molecular Genetics 2 (Wiley-Liss, New York, 1999). Usually polynucleotides comprise the four natural nucleosides (e.g. deoxyadenosine, deoxycytidine, deoxyguanosine, deoxythymidine for DNA or their ribose counterparts for RNA) linked by phosphodiester linkages; however, they may also comprise non-natural nucleotide analogs, e.g. including modified bases, sugars, or internucleosidic linkages. It is clear to those skilled in the art that where an enzyme has specific oligonucleotide or polynucleotide substrate requirements for activity, e.g. single stranded DNA, RNA/DNA duplex, or the like, then selection of appropriate composition for the oligonucleotide or polynucleotide substrates is well within the knowledge of one of ordinary skill, especially with guidance from treatises, such as Sambrook et al, Molecular Cloning, Second Edition (Cold Spring Harbor Laboratory, New York, 1989), and like references.

[0059] “Primer” means an oligonucleotide, either natural or synthetic, that is capable, upon forming a duplex with a polynucleotide template, of acting as a point of initiation of nucleic acid synthesis and being extended from its 3′ end along the template so that an extended duplex is formed. The sequence of nucleotides added during the extension process are determined by the sequence of the template polynucleotide. Usually primers are extended by a DNA polymerase. Primers usually have a length in the range of from 14 to 36 nucleotides.

[0060] “Readout” means a parameter, or parameters, which are measured and/or detected that can be converted to a number or value. In some contexts, readout may refer to an actual numerical representation of such collected or recorded data. For example, a readout of fluorescent intensity signals from a microarray is the address and fluorescence intensity of a signal being generated at each hybridization site of the microarray; thus, such a readout may be registered or stored in various ways, for example, as an image of the microarray, as a table of numbers, or the like.

[0061] “Sample” means a quantity of material from a biological, environmental, medical, or patient source in which detection or measurement of target nucleic acids is sought. On the one hand it is meant to include a specimen or culture (e.g., microbiological cultures). On the other hand, it is meant to include both biological and environmental samples. A sample may include a specimen of synthetic origin. Biological samples may be animal, including human, fluid, solid (e.g., stool) or tissue, as well as liquid and solid food and feed products and ingredients such as dairy items, vegetables, meat and meat by-products, and waste. Biological samples may include materials taken from a patient including, but not limited to cultures, blood, saliva, cerebral spinal fluid, pleural fluid, milk, lymph, sputum, semen, needle aspirates, and the like. Biological samples may be obtained from all of the various families of domestic animals, as well as feral or wild animals, including, but not limited to, such animals as ungulates, bear, fish, rodents, etc. Environmental samples include environmental material such as surface matter, soil, water and industrial samples, as well as samples obtained from food and dairy processing instruments, apparatus, equipment, utensils, disposable and non-disposable items. These examples are not to be construed as limiting the sample types applicable to the present invention. The term “admixture” refers to the phenomenon of gene flow between populations resulting from migration. Admixture can create linkage disequilibrium (LD).

[0062] “Solid support”, “support”, and “solid phase support” are used interchangeably and refer to a material or group of materials having a rigid or semi-rigid surface or surfaces. In many embodiments, at least one surface of the solid support will be substantially flat, although in some embodiments it may be desirable to physically separate synthesis regions for different compounds with, for example, wells, raised regions, pins, etched trenches, or the like. According to other embodiments, the solid support(s) will take the form of beads, resins, gels, microspheres, or other geometric configurations. Microarrays usually comprise at least one planar solid phase support, such as a glass microscope slide. See U.S. Pat. No. 5,744,305 for exemplary substrates.

[0063] “Specific” or “specificity” in reference to the binding of one molecule to another molecule, such as a labeled target sequence for a probe, means the recognition, contact, and formation of a stable complex between the two molecules, together with substantially less recognition, contact, or complex formation of that molecule with other molecules. In one aspect, “specific” in reference to the binding of a first molecule to a second molecule means that to the extent the first molecule recognizes and forms a complex with another molecules in a reaction or sample, it forms the largest number of the complexes with the second molecule. Preferably, this largest number is at least fifty percent. Generally, molecules involved in a specific binding event have areas on their surfaces or in cavities giving rise to specific recognition between the molecules binding to each other. Examples of specific binding include antibody-antigen interactions, enzyme-substrate interactions, formation of duplexes or triplexes among polynucleotides and/or oligonucleotides, receptor-ligand interactions, and the like. As used herein, “contact” in reference to specificity or specific binding means two molecules are close enough that weak non-covalent chemical interactions, such as Van der Waal forces, hydrogen bonding, base-stacking interactions, ionic and hydrophobic interactions, and the like, dominate the interaction of the molecules.

[0064] “Tm” is used in reference to “melting temperature.” Melting temperature is the temperature at which a population of double-stranded nucleic acid molecules becomes half dissociated into single strands. Several equations for calculating the Tm of nucleic acids are well known in the art. As indicated by standard references, a simple estimate of the Tm value may be calculated by the equation. Tm=81.5+0.41 (% G+C), when a nucleic acid is in aqueous solution at 1 M NaCl (see e.g., Anderson and Young, Quantitative Filter Hybridization, in Nucleic Acid Hybridization (1985). Other references (e.g., Allawi, H. T. & SantaLucia, J., Jr., Biochemistry 36, 10581-94 (1997)) include alternative methods of computation which take structural and environmental, as well as sequence characteristics into account for the calculation of Tm.

### Methods for Genotyping Polymorphisms

[0065] The disclosed methods are directed to novel methods of detecting variation in nucleic acid sequences. Forms of variation that may be detected include, for example, genetic variation, epigenetic variation, and variation at the level of gene expression. Types of genetic variation may include, for example, polymorphism, mutation, genetic copy number variation, including amplification and deletion of genetic regions and genomic rearrangements. Epigenetic variations that may be analyzed include, for example, methylation status of positions or regions, such as promoter regions. Gene expression variation may include, for example, changes in splicing pattern and changes in the level of a transcript.

[0066] In many aspects the methods are based upon the work previously described in U.S. Pat. No. 6,858,412. In one aspect a single color assay is used and each extension reaction is hybridized to a different array. Four separate arrays are used—one for each nucleotide (A, C, G, and T).

[0067] In another aspect the assay is a gap fill with two probes per polymorphism. Each probe is specific for one of the two alleles for a biallelic polymorphism. Two allele specific probes for each polymorphism. The probes are complementary to different alleles and have different tag sequences that are specific for the allele targeted by the probe. The assay may be a single color assay in a single tube and may include a gap filling step or simply a ligation step. This approach may be used, for example, for single base changes, insertions and deletions.

[0068] In another aspect two allele specific probes are used for each SNP. Both probes have the same tag sequence and the assay is preformed using differentially detectable labels for each of the different alleles. The assay is performed in parallel in two separate tubes. Each of the allele specific probes for a given SNP are in a separate reaction tube. The separate reaction tubes are distinguishably labeled and hybridized to the same array.

[0069] In another aspect the assay is performed as a 1 color, 1 array, using allele specific probes with different tags and gap fill.

[0070] In another aspect allele specific probes that have the same tag but different primers are used. The primers are used to differentially label the products so that each allele is labeled with a different color. This is a two color option with a single array.

[0071] Methods for multiplex characterization of genomic DNA using molecular inversion probe (MIP) methodology have been disclosed in U.S. Pat. Nos. 6,858,412, 5,866,337, and 5,871,921 and in Patent Pub. 20060281098, the entire disclosures of which are incorporated herein by reference for all purposes. In general, the methods disclosed herein are improvements to the methods of the U.S. Pat. No. 6,858,412. Other methods may also be used to genotype the polymorphisms in the selected set of polymorphisms, including, for example, the genotyping methods described in Steemers and Gunderson, Biotechnol. J. 2007, 2(1):41-9, Gunderson et al., Methods Enzymol 410:359-76 (2006), Gunderson et al., Genome Res., 8(11): 1142-53 (1998), Lovmar and Syvanen, Methods Mol. Med. 114:79-92 (2005), and Syvanen, Nat. Genet. 37:S5-S10 (2005). Such methods that may be used include single base extension (SBE), oligonucleotide ligation based assays, real time PCR methods, allele specific primer extension (ASPE), mass spectrometry, and allele specific hybridization methods, including array based methods, for example.

[0072] In one aspect, the assay is a single color assay and instead of using a different detectable label for each NTP a single label is used. Each NTP reaction may be performed in a separate tube and hybridized separately to a different array. In another aspect different tag sequences are used for different alleles. For example, two sets of MIPs may be used in separate reactions. For each allele, A or B, the A allele probe may be in a first set of MIPs and the B allele in a second, separate set of MIPs. The A and B allele probes for the SNP may vary only in the tag sequence. So, for each SNP there is a first MIP with tag 1 and a second MIP with tag 2, but the first and second MIPs may have the same target sequences. The extension reaction for the first and second MIP sets may be separate and each may include 2 of the 4 possible NTPs. At a point after extension and prior to hybridization to a single array the reactions may be mixed. For example, the first reaction may have A and C and the second G and T. The presence of allele A

[0073] In another aspect, fewer separate reactions steps are used. The reagents are added on fewer occasions. In preferred aspects the reactions take place in a single reaction tube or container. The reagents may be provided in a microtitre plate format, for example, in standard 96 or 384 well plates. These features may be combined to make the assay more automatable, provides for reduced reagent consumption and reduced sample consumption, allowing less sample to be used for a reaction, for example about 500 ng of DNA may be used per reaction to genotype 1,500 to 50,000 polymorphisms. In another aspect, Single color SAPE detection is used.

[0074] In some embodiments the methods allow for addition of reagents at fewer steps, for example, in one preferred embodiment reagents are added at only the following steps: annealing step, gap filling step, an amplification step, a digestion step, a hybridization step and a staining step (6 additions). This is an improvement over earlier methods where reagents were added at annealing, gap filling, dNTP, exonuclease, UNG, Amplification 1, Amplification 2, digest, hybridization and staining (10 additions). In the present embodiment reagents are added at no more than 6 separate steps during the entire reaction as compared to 10 reagent addition steps in earlier methods. In a preferred aspect the number of addition steps is decreased by combining reagents and adding them in a single reagent addition step instead of separate steps. In one aspect, at the gap filling reagent addition step the following reagents are added simultaneously: DNA ligase, DNA polymerase and exonuclease. The UNG and amplification reagents are added in a single addition. The reaction undergoes a single amplification step instead of two separate amplification steps. In addition, instead of using four separate tubes for the annealing through digestion-one for each of the four possible dNTPs, the reaction takes place in a single tube with all dNTPs included. The dNTPs may be combined with the MIP assay panel.

[0075] In one aspect the reagents for the gap fill reaction, the ligation reaction and the exonuclease reaction are added at the same time. The gap fill and ligation reaction occur more rapidly than the exonuclease reaction, allowing the specific circularization reaction to take place in the same reaction as the cleavage of uncircularized probes. In one aspect the gap fill/ligation/exonuclease reaction is at 37° C.

[0076] In one aspect the ligase is NAD dependent E. Coli DNA ligase and the DNA polymerase is Klenow (exo-).

[0077] In another aspect methods to reduce the amount of genomic DNA used for each sample are disclosed. It was discovered that lower amounts of DNA can be used without impacting the call rate and repeatability if the amount of probe is increased. For example, a call rate of about 95% with a repeatability of greater than 99.75% can be achieved using about 4000 ng genomic DNA and about 50 amol/probe assay panel. If the amount of genomic DNA is decreased to 280 ng DNA and the amount of probe is increased to about 500 amol/probe similar call rates (about 95%) and repeatability (greater than 99.75%) can be achieved. Table 1 shows the call rate and reproducibility achieved with varying amounts of DNA and varying amounts of probe.

TABLE 1

| | Call rate | | repeatability | |
|---|---|---|---|---|
| | 50 | 500 | 50 | 500 |
| | amol/probe | amol/probe | amol/probe | amol/probe |
| 4000 ng DNA | 94.89 | 94.54 | 99.75 | 99.61 |
| 1000 ng DNA | 94.6 | 95.45 | 99.8 | 99.9 |
| 500 ng DNA | 93.05 | 94.4 | 99.61 | 99.87 |
| 250 ng DNA | 90.5 | 92.58 | 99.16 | 99.73 |
| 150 ng DNA | 88.14 | 90.6 | 98.52 | 99.48 |

[0078] The general orientation of the target to the probe is shown in FIG. 1A. The target strand 102 is shown in the 3′ to 5′ orientation left to right. The single stranded probe 101 hybridizes to the target strand so that the 3′ end of the probe is on the left and the 5′ on the right. The region of the target that is 5′ of the interrogation position 107 (right of the dotted line) is referred to as the “plus” side and the region that is 3′ (left of the dotted line) is referred to as the “minus” side.

[0079] In one embodiment biallelic polymorphisms are interrogated by two probes, each probe being allele specific. The probes vary at the interrogation position and at the tag sequence. (FIG. 1B) The two alleles are either a C [107] or an A [109]. Each allele specific MIP has a different tag sequence [111 and 113] and can be detected at a different feature of an array of probes. For the example, shown in FIG. 1, there are two probes [101 and 103] for interrogation of the SNP and each having a different base [115 and 117] at the interrogation position. The probes differ at the tag sequences [111 and 113] and at the terminal base [115 and 117]. The probes are molecular inversion probes as described in U.S. Pat. No. 6,858,412 and include first and second priming sites, a cleavage site between the first and second priming site and optionally a second cleavage site for a restriction enzyme or other method of cleavage. Preferably the allele specific bases [115 and 117] are at the 5′ end of the probes and the 3′ end may be extended to close the gap between the ends prior to ligation of the ends to form a closed single stranded circular probe (double stranded in the region hybridized to the target). The 5′ and 3′ regions of the probes are complementary to regions in the target that flank the polymorphism. In some embodiments the target complementary regions are the same for both alleles of the polymorphism. When the polymorphism is an insertion or deletion the flanking regions of the probe may vary. The ends of the probes are extended if the complementary allele is present

[0080] In some embodiments there is a gap of at least one base between the ends of the MIP when hybridized to the target. The use of a gap filling reaction in combination with allele specific probes may be particularly useful when there are two SNPs within a few bases of one another. The probes may be designed to be allele specific for the first SNP and include the second SNP within the gap. With this approach the probe will be complementary independent of the allele present at the second SNP.

[0081] The length of the gap can vary, for example, it may be 1, 2, 3, 4 or 5 bases. The gap may be positioned for example, so that the SNP is at the 3′ end of the MIP, one base in from the 3′ end of the MIP, at the 5′ end of the MIP, or one base in from the 5′ end of the MIP.

[0082] Probes with a gap at the plus 1 position (see FIG. 1A) showed the best performance. Because genomic DNA is double stranded there are two possible plus 1 probe designs for any SNP and in some embodiments probes are designed to be plus 1 when possible. For example, if there is a wobble at −1 the opposite strand may be used. If a wobble exists 5′ of the SNP (+ direction) a multinucleotide gap may be used and if 3′ (− direction) the opposite strand may be targeted.

[0083] There are differences in efficiency depending on which base is included as the GapFill base or the Run-on base. Probes may be designed and target strand selected to optimize signal by selected a preferred run-on or gapfill base. Each of the four possible bases shows different average signal when it is the GapFill base or the Run-on base as follows: A: gapfill 87%, run-on 96%, C: gapfill 90%, run-on 74%,G: gapfill 85%, run-on 100%, T: gapfill 100%, run-on 80%. In some aspects, if there is a wobble near the polymorphism the gap can be designed to include the wobble.

[0084] In another embodiment the reaction volume hybridized to the array may be varied. Different volumes from a 60 μl assay containing about 2800 probes and interrogating about 1400 SNPs, were hybridized to an array and call rate and average signal were measured. The volumes tested were 0.5, 1, 2, 4, 8, 16, and 32 μl. The average signal intensity increased approximately proportionately as the volume increased but the call rates were similar for 0.5 to 8 μl (between 84 and 86%) but slightly lower for 16 and 32 μl (about 83.5 and 80.75% respectively).

[0085] Methods for whole genome amplification may be used to amplify a genomic sample if the sample is limiting, for example, multiple displacement amplification (MDA), methods disclosed in U.S. Patent Pub. No. 20030143599 and 20030040620, or any other non-specific amplification method. REPLI-g kits for performing MDA are available from QIAGEN, Inc. If possible, such pre-amplification steps should be avoided because some sequences may amplify poorly or not at all while others may amplify with better than average efficiency, resulting in an amplified sample that is not completely representative of the starting sample. This is particularly true if the subsequent analysis is directed at a quantitative rather than qualitative question, for example, genomic copy number. Pre-amplification can also be problematic if the starting sample is of poor quality, for example, FFPE samples which may be degraded to some extent.

[0086] FIG. 4 shows a schematic of methods to use the precircle probe to measure the genotype of two polymorphisms that are close together. When hybridization based assays are used to genotype polymorphisms that are closely spaced within a genetic regions one of the polymorphisms may interfere with the detection of the second polymorphism. A second polymorphism that is near a first polymorphism being interrogated and within the probe being used to interrogate the first polymorphism is referred to herein as a “wobble”. The wobble may be a SNP, a variant or an indel. The wobble can interfere with genotyping of the first polymorphism by destabilizing the probe and affecting the efficiency of the probe annealing reaction. In some aspects a base analogue with altered specificity may be used at the probe position corresponding to the wobble, for example, inosine. This allows for hybridization regardless of the sequence at the secondary site.

[0087] In another aspect, two probes may be used. A first probe may be perfectly complementary to the region immediately adjacent to the interrogation position and include a first allele of the wobble, while the second probe may be identical to the first but contain a second allele of the wobble. The signals from the two probes are combined to give the genotype call for the interrogation position.

[0088] In another aspect methods for genotyping loci that have close homologs and sequence related pseudogenes present in the genome, are disclosed. Pseudogenes can complicate the analysis of related sequences and can cause homozygous calls to appear as heterozygous calls or vice versa. To overcome this, targets that contain pseudogenes may be subjected to a multiplex PCR amplification using primers that are specific to the desired gene. Increasing the concentration of the target section of the genome relative to the undesired but closely related regions increases the signal from the target and facilitates cluster separation.

[0089] In a preferred aspect, where a panel of SNPs is to be interrogated in a multiplex assay, such as the MIP assay with the DMET panel a subset of the loci may be amplified in a multiplex PCR using target specific primers prior to the MIP assay. In the DMET panel (shown in Tables 2 and 3), there are 31 loci that may be subjected to a single multiplex PCR (mPCR) amplification to generate 14 PCR amplicons. For example, CYP2D6 may be amplified as six amplicons covering eight exons. In one aspect, about 50 ng of genomic DNA may be amplified in the mPCR using the Qiagen Multiplex PCR kit. The amplified DNA may then be diluted and added back to the matched genomic DNA prior to or concurrent with the annealing stage. In a preferred aspect, the loci shown in Table 4 are subjected to mPCR in the DMET assay.

[0090] The columns of Table 3 are as follows: Affymetrix ID, External ID (for example rs#), Chromosome number, base pair position using NCBI build 35, gene name, alleles, and probe homology sequence with “N” at polymorphic position.

[0091] Genetic variation is an important determinant in the ability of different individuals to metabolize drugs. Studies of an individual's genetic background may be used to target medications and to adjust treatment dose depending on the polymorphisms present in the individual. The DMET panel facilitates such testing by providing a single assay that analyzes more than 1,200 polymorphisms in a set of genes that may play a role in drug metabolism. Related products that are available include the Roche Diagnostics AmpliChip CYP450 Test and the Third Wave Technologies Invader UGT1A1 test for identification of patients with the UGT1A1*28 allele.

[0092] In addition to analyzing a larger number of SNPs, the DMET panel is also a flexible platform. Additional polymorphisms can be added without modifying the underlying assay conditions or the detection method. The panel also interrogates many different genes simultaneously, facilitating the detection of particular combinations of alleles in different genes that may be involved in the metabolism of a new drug.

[0093] Table 5 shows a list of sequences that include SNPs that may be included in a panel for genotyping human patients for determining drug response and dosing. For each SNP an identifier is given, for example, an rs# followed by the sequence of one strand in a 5′ to 3′ orientation (left to right) with the polymorphic position in the center indicated in brackets with the two possible alleles separated by a /, for example, [C/G] indicates that the A and B alleles are C or G for the SNP. The polymorphic position is flanked by 50 bases upstream and downstream.

### EXAMPLES

### Example 1

[0094] The following probe designs were tested: 1 nt gap at minus 2, 1 nt gap at minus 1, 1 nt gap at 0, 1 nt gap at plus 1, 1 nt gap at plus 2, 2 nt gap at minus 1 and minus 2, 2 nt gap at plus 1 and plus 2, nick between minus 1 and minus 2, nick between minus 1 and 0, nick between 0 and plus 1, nick between plus 1 and plus 2 and 5 base pair gap (missing minus 1, minus 2, 0, plus 1 and plus 2. For a 1 nt gap the probes with a gap at plus 1 performed best followed by minus 1, plus 2 then minus 2.

### CONCLUSION

[0095] It is to be understood that the above description is intended to be illustrative and not restrictive. Many variations of the invention will be apparent to those of skill in the art upon reviewing the above description. The scope of the invention should be determined with reference to the appended claims, along with the full scope of equivalents to which such claims are entitled. All cited references, including patent and non-patent literature, are incorporated herein by reference in their entireties for all purposes.

Lengthy table referenced here
US20090131268A1-20090521-T00001
Please refer to the end of the specification for access instructions.

Lengthy table referenced here
US20090131268A1-20090521-T00002
Please refer to the end of the specification for access instructions.

Lengthy table referenced here
US20090131268A1-20090521-T00003
Please refer to the end of the specification for access instructions.

Lengthy table referenced here
US20090131268A1-20090521-T00004
Please refer to the end of the specification for access instructions.

LENGTHY TABLES
The patent application contains a lengthy table section. A copy of the table is available in electronic form from the USPTO web site (http://seqdata.uspto.gov/?pageRequest=docDetail&DocID=US20090131268A1). An electronic copy of the table will also be available from the USPTO upon request and payment of the fee set forth in 37 CFR 1.19(b)(3).

1. A method of determining a patient's risk for an adverse drug response comprising:
(a) genotyping the patient for each of the SNPs in Table 6 to obtain the patient's genotype for each of the SNPs in Table 6;
(b) comparing the genotype of the patient at each of a plurality of the SNPs in Table 5 to a table of genotypes for each of the SNPs listed in Table 6, wherein each of the genotypes in the table of genotypes is associated with a risk for an adverse drug response to one or more drugs selected from a plurality of drugs; and
(c) determining the patient's risk for an adverse drug response to a drug from said plurality of drugs.

2. The method of claim 1 wherein said genotyping is by a method comprising: hybridizing a padlock probe to a DNA sample from said patient; ligating the ends of the padlock probe in a sequence dependent manner to form a closed circle probe; amplifying the closed circle probe to obtain an amplification product and detecting the presence of the amplification product.

3. The method of claim 2 wherein the step of detecting comprises hybridization to an array of probes that are complementary to tag sequences that are present in the padlock probe and wherein padlock probes for different SNPs comprise different specific tag sequences that can be used to identify the individual SNPs.

4. The method of claims 1, 2 or 3 further comprising (i) genotyping the patent for at least 100 SNPs in Table 5 and (ii) repeating steps (b) and (c) for the at least 100 SNPs in Table 5 that were genotyped in step (i).

The application's sequence listing, which the Patent Office published only in electronic form, follows.

SEQUENCE LISTING (2548 sequences)

SEQ ID NO: 1 - DNA, 35 bp, Homo sapiens
  misc_feature (18)..(19): n is a, c, g, or t
aacaccctggctaggganngtgcggcgccgctcct

SEQ ID NO: 2 - DNA, 35 bp, Homo sapiens
  misc_feature (18)..(18): n is a, c, g, or t
  misc_feature (31)..(31): n is a, c, g, or t
gcaggtacgtgaagggcnggtgctgctgccnggcc

SEQ ID NO: 3 - DNA, 35 bp, Homo sapiens
  misc_feature (18)..(18): n is a, c, g, or t
  misc_feature (25)..(25): n is a, c, g, or t
ctgcccagaatgcgcacngtctccnggacgctgct

SEQ ID NO: 4 - DNA, 35 bp, Homo sapiens
  misc_feature (18)..(18): n is a, c, g, or t
  misc_feature (22)..(22): n is a, c, g, or t
gccttggccctctccaanctgntctacccggaggt

SEQ ID NO: 5 - DNA, 35 bp, Homo sapiens
  misc_feature (18)..(18): n is a, c, g, or t
  misc_feature (32)..(32): n is a, c, g, or t
ggcacaaggggagccgancggttggggaaggnggc

SEQ ID NO: 6 - DNA, 35 bp, Homo sapiens
  misc_feature (18)..(18): n is a, c, g, or t
  misc_feature (29)..(29): n is a, c, g, or t
tgttcgcaggtgtgtgcnggagtcccctnggtggc

SEQ ID NO: 7 - DNA, 35 bp, Homo sapiens
  misc_feature (18)..(18): n is a, c, g, or t
  misc_feature (34)..(34): n is a, c, g, or t
cccaggacgaggaacccncgcgcgttctgcctgng

SEQ ID NO: 8 - DNA, 35 bp, Homo sapiens
  misc_feature (18)..(18): n is a, c, g, or t
aacctcctggggacctgnctgggctggggccattt

SEQ ID NO: 9 - DNA, 35 bp, Homo sapiens
  misc_feature (18)..(18): n is a, c, g, or t
cactagaagcgtgtggcnttggccctgcttgaagt

SEQ ID NO: 10 - DNA, 35 bp, Homo sapiens
  misc_feature (18)..(18): n is a, c, g, or t
ccaccatgctggcctcanggatgcttctggtggcc

SEQ ID NO: 11 - DNA, 35 bp, Homo sapiens
  misc_feature (18)..(18): n is a, c, g, or t
ttgcccagcacaaaggcngtgaggggcatgatgcc

SEQ ID NO: 12 - DNA, 35 bp, Homo sapiens
  misc_feature (18)..(18): n is a, c, g, or t
ctgagttccggcctgagnggttcctcaccgccgat

SEQ ID NO: 13 - DNA, 35 bp, Homo sapiens
  misc_feature (18)..(18): n is a, c, g, or t
tgccgcgtccctgccccnacccgggtctggtgctg

SEQ ID NO: 14 - DNA, 35 bp, Homo sapiens
  misc_feature (18)..(18): n is a, c, g, or t
cccagcccctgcccctangggcgctgcagcctccc

SEQ ID NO: 15 - DNA, 35 bp, Homo sapiens
  misc_feature (18)..(18): n is a, c, g, or t
ctagtggagaccatgcgngtgggcagccgattgct

SEQ ID NO: 16 - DNA, 35 bp, Homo sapiens
  misc_feature (18)..(18): n is a, c, g, or t
tgggctaggtgtaggggncctgagttccgggcttt

SEQ ID NO: 17 - DNA, 35 bp, Homo sapiens
  misc_feature (18)..(18): n is a, c, g, or t
ggaagctctccccttccngcccccgcggcacgtgc

SEQ ID NO: 18 - DNA, 35 bp, Homo sapiens
  misc_feature (18)..(18): n is a, c, g, or t
ccatgctctgcagcgtgngcacagccagggcagcc

SEQ ID NO: 19 - DNA, 35 bp, Homo sapiens
  misc_feature (18)..(18): n is a, c, g, or t
tccctggggctggccacncccacggctgtcatggt

SEQ ID NO: 20 - DNA, 35 bp, Homo sapiens
  misc_feature (18)..(18): n is a, c, g, or t
gcggggcgatatcgtcanggtggtccctgggggaa

SEQ ID NO: 21 - DNA, 35 bp, Homo sapiens
  misc_feature (18)..(18): n is a, c, g, or t
agtgcgtagaggcagagnggggtgcccacggcacg

SEQ ID NO: 22 - DNA, 35 bp, Homo sapiens
  misc_feature (18)..(18): n is a, c, g, or t
aggacttccctgcccccnctggaccgacaacagcc

SEQ ID NO: 23 - DNA, 35 bp, Homo sapiens
  misc_feature (18)..(18): n is a, c, g, or t
acaacgtcccgctggttngccgtccgtctggatgc

SEQ ID NO: 24 - DNA, 35 bp, Homo sapiens
  misc_feature (18)..(18): n is a, c, g, or t
acatcggcctccatgacntgcgctctcagctgacc

SEQ ID NO: 25 - DNA, 35 bp, Homo sapiens
  misc_feature (18)..(18): n is a, c, g, or t
cgtaccttctcgccaccntgcacatgcagactcag

SEQ ID NO: 26 - DNA, 35 bp, Homo sapiens
  misc_feature (18)..(18): n is a, c, g, or t
ccagctgctgcgcacggnggcctacctccacacca

SEQ ID NO: 27 - DNA, 35 bp, Homo sapiens
  misc_feature (18)..(18): n is a, c, g, or t
gtgggggtcagaagcagnggatcagcctggccaga

SEQ ID NO: 28 - DNA, 35 bp, Homo sapiens
  misc_feature (18)..(18): n is a, c, g, or t
cagaggcgcttctccgtntccaccttgcgcaactt

SEQ ID NO: 29 - DNA, 35 bp, Homo sapiens
  misc_feature (18)..(18): n is a, c, g, or t
ctcctgcacagagaagcnctgagtggtggctgagc

SEQ ID NO: 30 - DNA, 35 bp, Homo sapiens
  misc_feature (18)..(18): n is a, c, g, or t
gctgacgtggcctcatcnagcaggaggatcttggg

SEQ ID NO: 31 - DNA, 35 bp, Homo sapiens
  misc_feature (18)..(18): n is a, c, g, or t
ggggcacggctgggagcnaggcggggcggggaccg

SEQ ID NO: 32 - DNA, 35 bp, Homo sapiens
  misc_feature (18)..(18): n is a, c, g, or t
gttcaggactgcgcacantgcccgggagaaactgg

SEQ ID NO: 33 - DNA, 35 bp, Homo sapiens
  misc_feature (18)..(18): n is a, c, g, or t
gcagcatccccgtggctnctcctgctggtggtcgg

SEQ ID NO: 34 - DNA, 35 bp, Homo sapiens
  misc_feature (18)..(18): n is a, c, g, or t
cactgcccaagactgggntggctccagggagctgg

SEQ ID NO: 35 - DNA, 35 bp, Homo sapiens
  misc_feature (18)..(18): n is a, c, g, or t
ggctgcgggtggagcccntgagctgagttctgcag

SEQ ID NO: 36 - DNA, 35 bp, Homo sapiens
  misc_feature (18)..(18): n is a, c, g, or t
ctgactcagctggtggcnacctacccccagggctt

SEQ ID NO: 37 - DNA, 35 bp, Homo sapiens
  misc_feature (18)..(18): n is a, c, g, or t
cgacatctgggtcgagtncttcaagccctcctctg

SEQ ID NO: 38 - DNA, 35 bp, Homo sapiens
  misc_feature (18)..(18): n is a, c, g, or t
ctcggcgcgcatgatcanttccagcttcctgcggg

SEQ ID NO: 39 - DNA, 35 bp, Homo sapiens
  misc_feature (18)..(18): n is a, c, g, or t
tcatccaggagcggcgcngcaccctccccactcag

SEQ ID NO: 40 - DNA, 35 bp, Homo sapiens
  misc_feature (18)..(18): n is a, c, g, or t
cttctgctgctggttggnggctcctggctcctggc

SEQ ID NO: 41 - DNA, 35 bp, Homo sapiens
  misc_feature (18)..(18): n is a, c, g, or t
gtggtcctggcgctcacnctgctgcacttccgcat

SEQ ID NO: 42 - DNA, 35 bp, Homo sapiens
  misc_feature (18)..(18): n is a, c, g, or t
gagaggggtctgggtccnggaggcagctttccctt

SEQ ID NO: 43 - DNA, 35 bp, Homo sapiens
  misc_feature (18)..(18): n is a, c, g, or t
  misc_feature (35)..(35): n is a, c, g, or t
gctccccgttgctgaacnccacgcctggggaggtn

SEQ ID NO: 44 - DNA, 35 bp, Homo sapiens
  misc_feature (18)..(18): n is a, c, g, or t
ccctgcgggccaaactcntggggatcacgtctcca

SEQ ID NO: 45 - DNA, 35 bp, Homo sapiens
  misc_feature (18)..(18): n is a, c, g, or t
ttcagggttccggcgtancgggcggccgcttgagg

SEQ ID NO: 46 - DNA, 35 bp, Homo sapiens
  misc_feature (18)..(18): n is a, c, g, or t
tggcccaagagaaggtgncctggtgccaagtaccc

SEQ ID NO: 47 - DNA, 35 bp, Homo sapiens
  misc_feature (18)..(18): n is a, c, g, or t
cctaggacggtgctgccntttgaagccatgcccca

SEQ ID NO: 48 - DNA, 35 bp, Homo sapiens
  misc_feature (18)..(18): n is a, c, g, or t
cactgggcactagagccnctcgggcccctaggacg

SEQ ID NO: 49 - DNA, 35 bp, Homo sapiens
  misc_feature (18)..(18): n is a, c, g, or t
ggctctcctggcgcaggntctgctgcacgtcgggg

SEQ ID NO: 50 - DNA, 35 bp, Homo sapiens
  misc_feature (18)..(18): n is a, c, g, or t
ccaggaactggccttcanccgccctcaacactaca

SEQ ID NO: 51 - DNA, 35 bp, Homo sapiens
  misc_feature (18)..(18): n is a, c, g, or t
atgcctgctcctcccaantcgtacctgtggggcca

SEQ ID NO: 52 - DNA, 35 bp, Homo sapiens
  misc_feature (18)..(18): n is a, c, g, or t
ggcaaaggcagaggtgtncatggcagtgccctggc

SEQ ID NO: 53 - DNA, 35 bp, Homo sapiens
  misc_feature (18)..(18): n is a, c, g, or t
  misc_feature (35)..(35): n is a, c, g, or t
acctgttgcctggacgcnggggcatggcttcaaan

SEQ ID NO: 54 - DNA, 35 bp, Homo sapiens
  misc_feature (18)..(18): n is a, c, g, or t
cccaaggcaggttcacgnaggaaactgcagcctcc

SEQ ID NO: 55 - DNA, 35 bp, Homo sapiens
  misc_feature (18)..(18): n is a, c, g, or t
ccactccccagtgctccngtgcagggagaggaagc

SEQ ID NO: 56 - DNA, 35 bp, Homo sapiens
  misc_feature (18)..(18): n is a, c, g, or t
gggtcctctgcttcctgngctgtcccctggggaag

SEQ ID NO: 57 - DNA, 35 bp, Homo sapiens
  misc_feature (18)..(18): n is a, c, g, or t
accagccccagcacaaanggaactcccgagggcct

SEQ ID NO: 58 - DNA, 35 bp, Homo sapiens
  misc_feature (18)..(18): n is a, c, g, or t
cactcctacgacgcggtngtgtgggagcctcgcac

SEQ ID NO: 59 - DNA, 35 bp, Homo sapiens
  misc_feature (18)..(18): n is a, c, g, or t
gccagccactgcctgctnctgtagcatcgcccaac

SEQ ID NO: 60 - DNA, 35 bp, Homo sapiens
  misc_feature (18)..(18): n is a, c, g, or t
cgcctgtggaagctgctntccccagccaggctggc

SEQ ID NO: 61 - DNA, 35 bp, Homo sapiens
  misc_feature (18)..(18): n is a, c, g, or t
cagggcaggcttggaacnggaacttgtgcagcacg

SEQ ID NO: 62 - DNA, 35 bp, Homo sapiens
  misc_feature (18)..(18): n is a, c, g, or t
ggttcacggctgaggccnggcagcagcaccggccc

SEQ ID NO: 63 - DNA, 35 bp, Homo sapiens
  misc_feature (1)..(1): n is a, c, g, or t
  misc_feature (18)..(18): n is a, c, g, or t
nctgtgctagagatggcngtgggtgccctgcacca

SEQ ID NO: 64 - DNA, 35 bp, Homo sapiens
  misc_feature (18)..(18): n is a, c, g, or t
gctggcgggtacatcctnagcgtctctgcaatcac

SEQ ID NO: 65 - DNA, 35 bp, Homo sapiens
  misc_feature (18)..(18): n is a, c, g, or t
atagggcaggccttcctngaggctgcagaactcag

SEQ ID NO: 66 - DNA, 35 bp, Homo sapiens
  misc_feature (18)..(18): n is a, c, g, or t
agggctgggctggtgttnccgggaagggttcggct

SEQ ID NO: 67 - DNA, 35 bp, Homo sapiens
  misc_feature (18)..(18): n is a, c, g, or t
gtggttgccagcgtcgcntttggcaccccggtgga

SEQ ID NO: 68 - DNA, 35 bp, Homo sapiens
  misc_feature (18)..(18): n is a, c, g, or t
tcacacgggaggcagctnaggactgcgaggtgctg

SEQ ID NO: 69 - DNA, 35 bp, Homo sapiens
  misc_feature (18)..(18): n is a, c, g, or t
ctgaggagttcagcgggngaggcgagcaggccacc

SEQ ID NO: 70 - DNA, 35 bp, Homo sapiens
  misc_feature (18)..(18): n is a, c, g, or t
ccgggggtcagtaggggntgaggctgcactgagag

SEQ ID NO: 71 - DNA, 35 bp, Homo sapiens
  misc_feature (18)..(18): n is a, c, g, or t
acgctcctgctactcctntcggtgctggccactgt

SEQ ID NO: 72 - DNA, 35 bp, Homo sapiens
  misc_feature (18)..(18): n is a, c, g, or t
gttgggctggtcacccanacaaggcagacggtccc

SEQ ID NO: 73 - DNA, 35 bp, Homo sapiens
  misc_feature (18)..(18): n is a, c, g, or t
tccaccagggccatgggnctggcctctgattgggc

SEQ ID NO: 74 - DNA, 35 bp, Homo sapiens
  misc_feature (18)..(18): n is a, c, g, or t
ggcagcatccccattganttcagggtgtccctgct

SEQ ID NO: 75 - DNA, 35 bp, Homo sapiens
  misc_feature (18)..(18): n is a, c, g, or t
cagtcctgtggccagccncggcaggggaacctgga

SEQ ID NO: 76 - DNA, 35 bp, Homo sapiens
  misc_feature (18)..(18): n is a, c, g, or t
catggagctcccgcaagncctcccgcatgctgagc

SEQ ID NO: 77 - DNA, 35 bp, Homo sapiens
  misc_feature (18)..(18): n is a, c, g, or t
aagggcgtccccttcccngtcggcctgtactcgct

SEQ ID NO: 78 - DNA, 35 bp, Homo sapiens
  misc_feature (18)..(18): n is a, c, g, or t
ggttgagtgtgccacganggagcccagtgcctcct

SEQ ID NO: 79 - DNA, 35 bp, Homo sapiens
  misc_feature (18)..(18): n is a, c, g, or t
cagtgccaaagggcaggncggtacctcaccccacg

SEQ ID NO: 80 - DNA, 35 bp, Homo sapiens
  misc_feature (18)..(18): n is a, c, g, or t
tatgtggggcgcctcagngcccggcccaagctcaa

SEQ ID NO: 81 - DNA, 35 bp, Homo sapiens
  misc_feature (18)..(18): n is a, c, g, or t
agtggggcaacaagcctntatgctgagcaggaggc

SEQ ID NO: 82 - DNA, 35 bp, Homo sapiens
  misc_feature (18)..(18): n is a, c, g, or t
acgccggcattagtcgcncctgcgcacggccctgt

SEQ ID NO: 83 - DNA, 35 bp, Homo sapiens
  misc_feature (18)..(18): n is a, c, g, or t
tggcgatggagaagcgcnggagctgcttggcgcgc

SEQ ID NO: 84 - DNA, 35 bp, Homo sapiens
  misc_feature (1)..(1): n is a, c, g, or t
  misc_feature (18)..(18): n is a, c, g, or t
ngatgctgtcgtcctccntggctgcggacctcgtg

SEQ ID NO: 85 - DNA, 35 bp, Homo sapiens
  misc_feature (18)..(18): n is a, c, g, or t
gggacttcgggatggganagcggagtgtggaggag

SEQ ID NO: 86 - DNA, 35 bp, Homo sapiens
  misc_feature (13)..(13): n is a, c, g, or t
  misc_feature (18)..(18): n is a, c, g, or t
gagcccgggaacncacanagcgtgctggaggccat

SEQ ID NO: 87 - DNA, 35 bp, Homo sapiens
  misc_feature (18)..(18): n is a, c, g, or t
cagcgcatcctgaaccangtgctgcagcatgcgga

SEQ ID NO: 88 - DNA, 35 bp, Homo sapiens
  misc_feature (18)..(18): n is a, c, g, or t
cgttccagccgataaggnacaggccccagccccag

SEQ ID NO: 89 - DNA, 35 bp, Homo sapiens
  misc_feature (18)..(18): n is a, c, g, or t
atcaaccccgactgtgcngccatcacccagcggat

SEQ ID NO: 90 - DNA, 35 bp, Homo sapiens
  misc_feature (18)..(18): n is a, c, g, or t
gtgctggggcagcatgcngagtgcccctgttcgtg

SEQ ID NO: 91 - DNA, 35 bp, Homo sapiens
  misc_feature (18)..(18): n is a, c, g, or t
aaggcactgcaggcgggnggcgagcacagtgcacg

SEQ ID NO: 92 - DNA, 35 bp, Homo sapiens
  misc_feature (18)..(18): n is a, c, g, or t
gcgcctttccccgaggcnccatcagcaagcaggac

SEQ ID NO: 93 - DNA, 35 bp, Homo sapiens
  misc_feature (18)..(18): n is a, c, g, or t
ccctcatgcccatcccangccccaattactgccca

SEQ ID NO: 94 - DNA, 35 bp, Homo sapiens
  misc_feature (18)..(18): n is a, c, g, or t
ccccatgtggaggtcggnggggctgggactgggga

SEQ ID NO: 95 - DNA, 35 bp, Homo sapiens
  misc_feature (18)..(18): n is a, c, g, or t
agaggtcgaagaggcgcngctggtagaaggggctg

SEQ ID NO: 96 - DNA, 35 bp, Homo sapiens
  misc_feature (18)..(18): n is a, c, g, or t
cttcctcatcgacgcccnccggggcactggcggtg

SEQ ID NO: 97 - DNA, 35 bp, Homo sapiens
  misc_feature (18)..(18): n is a, c, g, or t
ctggccaccacgcgcagnggctcctccttcgtggg

SEQ ID NO: 98 - DNA, 35 bp, Homo sapiens
  misc_feature (18)..(18): n is a, c, g, or t
ggggcagtaggctgactncttggcctcctgggagc

SEQ ID NO: 99 - DNA, 35 bp, Homo sapiens
  misc_feature (18)..(18): n is a, c, g, or t
tgtgctctgcagggaacncagtggtcctcaagccc

SEQ ID NO: 100 - DNA, 35 bp, Homo sapiens
  misc_feature (18)..(18): n is a, c, g, or t
cagggcgaccctgacctncccggctgatgctccag

SEQ ID NO: 101 - DNA, 35 bp, Homo sapiens
  misc_feature (18)..(18): n is a, c, g, or t
cttggctgaaggggcgcngcccgatgcccatgagg

SEQ ID NO: 102 - DNA, 35 bp, Homo sapiens
  misc_feature (18)..(18): n is a, c, g, or t
ccccagccccacttacanatgcaggcagcagccag

SEQ ID NO: 103 - DNA, 35 bp, Homo sapiens
  misc_feature (18)..(18): n is a, c, g, or t
ctcttcccgagctgcttngccccttatgctgccag

SEQ ID NO: 104 - DNA, 35 bp, Homo sapiens
  misc_feature (18)..(18): n is a, c, g, or t
gagagggtggcatgctgnagcccatgctggtcacg

SEQ ID NO: 105 - DNA, 35 bp, Homo sapiens
  misc_feature (18)..(18): n is a, c, g, or t
cgaacatgaccaggccantgaggcagcccacgcag

SEQ ID NO: 106 - DNA, 35 bp, Homo sapiens
  misc_feature (18)..(18): n is a, c, g, or t
accctgtccgtcttcccngccatcacagccatggt

SEQ ID NO: 107 - DNA, 35 bp, Homo sapiens
  misc_feature (18)..(18): n is a, c, g, or t
gcagaaggaaggggcagnaggcagacagggaggga

SEQ ID NO: 108 - DNA, 35 bp, Homo sapiens
  misc_feature (18)..(18): n is a, c, g, or t
aagggcagggccaagacngggcttgggagaggggc

SEQ ID NO: 109 - DNA, 35 bp, Homo sapiens
  misc_feature (18)..(18): n is a, c, g, or t
agttcagcccagaggccntggacaactgctgtcgg

SEQ ID NO: 110 - DNA, 35 bp, Homo sapiens
  misc_feature (18)..(18): n is a, c, g, or t
ctttggccccagaagccntttcagcaggcggtggc

SEQ ID NO: 111 - DNA, 35 bp, Homo sapiens
  misc_feature (18)..(18): n is a, c, g, or t
caggaggcaggccaccancaggaaggcagagagcc

SEQ ID NO: 112 - DNA, 35 bp, Homo sapiens
  misc_feature (18)..(18): n is a, c, g, or t
gtccaccactgtcgcccnccccacaatgcctccac

SEQ ID NO: 113 - DNA, 35 bp, Homo sapiens
  misc_feature (18)..(18): n is a, c, g, or t
ccgcagctgggttgctcngggagctgagtccgagc

SEQ ID NO: 114 - DNA, 35 bp, Homo sapiens
  misc_feature (18)..(18): n is a, c, g, or t
caggaacatggcggtggnggtcacatccacggcct

SEQ ID NO: 115 - DNA, 35 bp, Homo sapiens
  misc_feature (18)..(18): n is a, c, g, or t
gtaaggctggaggggganggaagtggagggcccca

SEQ ID NO: 116 - DNA, 35 bp, Homo sapiens
  misc_feature (18)..(18): n is a, c, g, or t
caccagagtgccacgcanagcacccccggcatcgt

SEQ ID NO: 117 - DNA, 35 bp, Homo sapiens
  misc_feature (18)..(18): n is a, c, g, or t
gtacaccccagcagccantgcggggagatgcaaag

SEQ ID NO: 118 - DNA, 35 bp, Homo sapiens
  misc_feature (18)..(18): n is a, c, g, or t
ccagcaaccaagccaagnacgcctgaaagccaaac

SEQ ID NO: 119 - DNA, 35 bp, Homo sapiens
  misc_feature (18)..(18): n is a, c, g, or t
ctcaccatcgaccgcatnggacgccgttacccttg

SEQ ID NO: 120 - DNA, 35 bp, Homo sapiens
  misc_feature (18)..(18): n is a, c, g, or t
tcaccattgaccgcgtgngccgcatctaccccatg

SEQ ID NO: 121 - DNA, 35 bp, Homo sapiens
  misc_feature (18)..(18): n is a, c, g, or t
cctgttccgcacgccgcncctgaggaagcgcacct

SEQ ID NO: 122 - DNA, 35 bp, Homo sapiens
  misc_feature (18)..(18): n is a, c, g, or t
agacctgttccgcacgcngcgcctgaggaagcgca

SEQ ID NO: 123 - DNA, 35 bp, Homo sapiens
  misc_feature (18)..(18): n is a, c, g, or t
gctggtcaacgcggtgtngggcgtgctcatggcct

SEQ ID NO: 124 - DNA, 35 bp, Homo sapiens
  misc_feature (18)..(18): n is a, c, g, or t
aggccttccttggccagngcaggcgctatgaagtg

SEQ ID NO: 125 - DNA, 35 bp, Homo sapiens
  misc_feature (18)..(18): n is a, c, g, or t
ccgcgggcgaggccttcnttggccagtgcaggcgc

SEQ ID NO: 126 - DNA, 35 bp, Homo sapiens
  misc_feature (18)..(18): n is a, c, g, or t
tggctgagctgagccagngctgtggctggagccct

SEQ ID NO: 127 - DNA, 35 bp, Homo sapiens
  misc_feature (18)..(18): n is a, c, g, or t
agctcagccaccccaggnctctggcagtggtggtc

SEQ ID NO: 128 - DNA, 35 bp, Homo sapiens
  misc_feature (18)..(18): n is a, c, g, or t
ggagcaggttggggagtntggctggttccagaagc

SEQ ID NO: 129 - DNA, 35 bp, Homo sapiens
  misc_feature (18)..(18): n is a, c, g, or t
ccctgggctggagctgtntccaagctgcatggagg

SEQ ID NO: 130 - DNA, 35 bp, Homo sapiens
  misc_feature (18)..(18): n is a, c, g, or t
ctggagcgcatgaatccnggcccaggcgggaagct

SEQ ID NO: 131 - DNA, 35 bp, Homo sapiens
  misc_feature (18)..(18): n is a, c, g, or t
ctggccgtgctggtgccngtgttcctgctcaccga

SEQ ID NO: 132 - DNA, 35 bp, Homo sapiens
  misc_feature (18)..(18): n is a, c, g, or t
tggcctcagggatgcttntggtggccttgctggtc

SEQ ID NO: 133 - DNA, 35 bp, Homo sapiens
  misc_feature (18)..(18): n is a, c, g, or t
gtacgtgggctcgcagcncatggtggtgatgcacg

SEQ ID NO: 134 - DNA, 36 bp, Homo sapiens
  misc_feature (18)..(18): n is a, c, g, or t
  misc_feature (29)..(29): n is a, c, g, or t
tgcaggggagaaactgcnactagtggagnccatgcg

SEQ ID NO: 135 - DNA, 36 bp, Homo sapiens
  misc_feature (18)..(18): n is a, c, g, or t
  misc_feature (35)..(35): n is a, c, g, or t
taggggccctcatggacnccaccttcctcttccant

SEQ ID NO: 136 - DNA, 36 bp, Homo sapiens
  misc_feature (18)..(18): n is a, c, g, or t
  misc_feature (32)..(32): n is a, c, g, or t
agcctcaggtgccttgtntcttccgtttgacngaag

SEQ ID NO: 137 - DNA, 36 bp, Homo sapiens
  misc_feature (19)..(19): n is a, c, g, or t
  misc_feature (27)..(27): n is a, c, g, or t
tgaaaccctggaccccagngcccccanggacctcat

SEQ ID NO: 138 - DNA, 36 bp, Homo sapiens
  misc_feature (19)..(19): n is a, c, g, or t
  misc_feature (26)..(26): n is a, c, g, or t
ccacgtggttagtggcaanctggtgnccccccttcc

SEQ ID NO: 139 - DNA, 36 bp, Homo sapiens
  misc_feature (19)..(19): n is a, c, g, or t
ctcctgggtgatgtggacntggcatcaccacccagt

SEQ ID NO: 140 - DNA, 36 bp, Homo sapiens
  misc_feature (18)..(18): n is a, c, g, or t
gcctcacctgtggggganggtgaagggcaagaagga

SEQ ID NO: 141 - DNA, 36 bp, Homo sapiens
  misc_feature (18)..(18): n is a, c, g, or t
gagacctggtctggggcnagagcaactaagccacct

SEQ ID NO: 142 - DNA, 36 bp, Homo sapiens
  misc_feature (18)..(18): n is a, c, g, or t
catgtgctctgagtgccncaccttgcttggcatttg

SEQ ID NO: 143 - DNA, 36 bp, Homo sapiens
  misc_feature (19)..(19): n is a, c, g, or t
tctccactgtagcccactngctgtcttcgcaccttg

SEQ ID NO: 144 - DNA, 36 bp, Homo sapiens
  misc_feature (18)..(18): n is a, c, g, or t
ctggcctctgccatcttntgcctggtattctgggtg

SEQ ID NO: 145 - DNA, 36 bp, Homo sapiens
  misc_feature (19)..(19): n is a, c, g, or t
gaggaagtccaaccccccnggcccgctgtttctttc

SEQ ID NO: 146 - DNA, 36 bp, Homo sapiens
  misc_feature (19)..(19): n is a, c, g, or t
gttgtactggctcccctcntttgcagtcagccctgc

SEQ ID NO: 147 - DNA, 36 bp, Homo sapiens
  misc_feature (18)..(18): n is a, c, g, or t
ccccgaagggagcatctntttacctggcagtggctc

SEQ ID NO: 148 - DNA, 36 bp, Homo sapiens
  misc_feature (19)..(19): n is a, c, g, or t
ccttgttttcagccccccnactccagcccgcagcac

SEQ ID NO: 149 - DNA, 36 bp, Homo sapiens
  misc_feature (18)..(18): n is a, c, g, or t
cgggatctgtgatggccngcacagggagttgacctt

SEQ ID NO: 150 - DNA, 36 bp, Homo sapiens
  misc_feature (18)..(18): n is a, c, g, or t
ctgctcccgggacttccnaaatccagggtgcttccc

SEQ ID NO: 151 - DNA, 36 bp, Homo sapiens
  misc_feature (19)..(19): n is a, c, g, or t
tttcagctctgtccgatcnggagctcgtggcccaat

SEQ ID NO: 152 - DNA, 36 bp, Homo sapiens
  misc_feature (18)..(18): n is a, c, g, or t
tgctgtgcctgggcaggnctctgcttcggaaatcca

SEQ ID NO: 153 - DNA, 36 bp, Homo sapiens
  misc_feature (19)..(19): n is a, c, g, or t
gccaacttgtggctgtganaggccctgtcggctctg

SEQ ID NO: 154 - DNA, 36 bp, Homo sapiens
  misc_feature (19)..(19): n is a, c, g, or t
tgtggattcccttgggctncctatggctcctggccc

SEQ ID NO: 155 - DNA, 36 bp, Homo sapiens
  misc_feature (18)..(18): n is a, c, g, or t
tctgcttgcaggtggccntgtgcacatttgccgtct

SEQ ID NO: 156 - DNA, 36 bp, Homo sapiens
  misc_feature (1)..(1): n is a, c, g, or t
  misc_feature (18)..(18): n is a, c, g, or t
ngggctggcggtagcccnggacaatcaacctggggc

SEQ ID NO: 157 - DNA, 36 bp, Homo sapiens
  misc_feature (19)..(19): n is a, c, g, or t
tgacaccctggttggaganagaggggcccagctgag

SEQ ID NO: 158 - DNA, 36 bp, Homo sapiens
  misc_feature (19)..(19): n is a, c, g, or t
ctatcccacccgagcaaangtgccagtgcttcaggg

SEQ ID NO: 159 - DNA, 36 bp, Homo sapiens
  misc_feature (18)..(18): n is a, c, g, or t
accagagccagcgtctgncccttcttcacctccagg

SEQ ID NO: 160 - DNA, 36 bp, Homo sapiens
  misc_feature (17)..(18): n is a, c, g, or t
ccagagccagcgtctgnnccttcttcacctccaggc

SEQ ID NO: 161 - DNA, 36 bp, Homo sapiens
  misc_feature (18)..(18): n is a, c, g, or t
tttctgagggagcagggngtaccctcagctatgcag

SEQ ID NO: 162 - DNA, 36 bp, Homo sapiens
  misc_feature (18)..(18): n is a, c, g, or t
cccttccgcttcgacccngaaaacgcccagaagagg

SEQ ID NO: 163 - DNA, 36 bp, Homo sapiens
  misc_feature (18)..(18): n is a, c, g, or t
ctcagggtccggccacanagctgggttgtgatgggt

SEQ ID NO: 164 - DNA, 36 bp, Homo sapiens
  misc_feature (18)..(18): n is a, c, g, or t
tctgggtgctttgcaagntggtacaggacccaggag

SEQ ID NO: 165 - DNA, 36 bp, Homo sapiens
  misc_feature (19)..(19): n is a, c, g, or t
gcagcaagaagccatagcncagggtggtgctgaccg

SEQ ID NO: 166 - DNA, 36 bp, Homo sapiens
  misc_feature (19)..(19): n is a, c, g, or t
cttgggtctaactggggcngcacctggctcaggctg

SEQ ID NO: 167 - DNA, 36 bp, Homo sapiens
  misc_feature (19)..(19): n is a, c, g, or t
tgtggaaaagctccctganttccccgcctgccccac

SEQ ID NO: 168 - DNA, 36 bp, Homo sapiens
  misc_feature (19)..(19): n is a, c, g, or t
atctgaaagcagctctgantcttgatctgggccagc

SEQ ID NO: 169 - DNA, 36 bp, Homo sapiens
  misc_feature (1)..(1): n is a, c, g, or t
  misc_feature (19)..(19): n is a, c, g, or t
ngccttcaacaggagctcngccacgatgcctgtgta

SEQ ID NO: 170 - DNA, 36 bp, Homo sapiens
  misc_feature (18)..(18): n is a, c, g, or t
cttctcccaggccctgangaagaaggtgctgcagaa

SEQ ID NO: 171 - DNA, 36 bp, Homo sapiens
  misc_feature (2)..(2): n is a, c, g, or t
  misc_feature (19)..(19): n is a, c, g, or t
ancaggaactggccttcanccgccctcaacagtaca

SEQ ID NO: 172 - DNA, 36 bp, Homo sapiens
  misc_feature (19)..(19): n is a, c, g, or t
cacagctggggaagatctngctgaccttgtccccag

SEQ ID NO: 173 - DNA, 36 bp, Homo sapiens
  misc_feature (19)..(19): n is a, c, g, or t
ccatcactggttctggccngggctgtgggcccccat

SEQ ID NO: 174 - DNA, 36 bp, Homo sapiens
  misc_feature (19)..(19): n is a, c, g, or t
catggcttctgtgagtgcntggagctctctgtggag

SEQ ID NO: 175 - DNA, 36 bp, Homo sapiens
  misc_feature (19)..(19): n is a, c, g, or t
ctcgacttctcctacagcntcctgctcaggtgaggc

SEQ ID NO: 176 - DNA, 36 bp, Homo sapiens
  misc_feature (18)..(18): n is a, c, g, or t
tccgctaccgcatccgcncatgacacagggagcaga

SEQ ID NO: 177 - DNA, 36 bp, Homo sapiens
  misc_feature (19)..(19): n is a, c, g, or t
cgagaattcaacctgcgangtggtgaccgcctcctc

SEQ ID NO: 178 - DNA, 36 bp, Homo sapiens
  misc_feature (18)..(18): n is a, c, g, or t
ctgcagcctcgaggaagncctgccctatctggacat

SEQ ID NO: 179 - DNA, 36 bp, Homo sapiens
  misc_feature (19)..(19): n is a, c, g, or t
tgcatcaaggagagcttcngcctctacccacctgtg

SEQ ID NO: 180 - DNA, 36 bp, Homo sapiens
  misc_feature (18)..(18): n is a, c, g, or t
tgaccagcccaacctgcnctatgtcctggccttcct

SEQ ID NO: 181 - DNA, 36 bp, Homo sapiens
  misc_feature (18)..(18): n is a, c, g, or t
tggctatcctgctgcaangggtggaattcagcgtgc

SEQ ID NO: 182 - DNA, 36 bp, Homo sapiens
  misc_feature (19)..(19): n is a, c, g, or t
tggaaacctggcttctccnggctgtcagcctggtgc

SEQ ID NO: 183 - DNA, 36 bp, Homo sapiens
  misc_feature (19)..(19): n is a, c, g, or t
caggtacttagccagcacngccgcgcagaggttaac

SEQ ID NO: 184 - DNA, 36 bp, Homo sapiens
  misc_feature (19)..(19): n is a, c, g, or t
agaccccgttaacctctgnggggcggtgctggctaa

SEQ ID NO: 185 - DNA, 36 bp, Homo sapiens
  misc_feature (18)..(18): n is a, c, g, or t
cggcaacatcatcccccngaacgttcccagggaagt

SEQ ID NO: 186 - DNA, 36 bp, Homo sapiens
  misc_feature (19)..(19): n is a, c, g, or t
ctctgtctgaggagcagtnaggaatgatcgctcagc

SEQ ID NO: 187 - DNA, 36 bp, Homo sapiens
  misc_feature (19)..(19): n is a, c, g, or t
ctcttctccaggggtctgnggcgactggaagaacca

SEQ ID NO: 188 - DNA, 36 bp, Homo sapiens
  misc_feature (19)..(19): n is a, c, g, or t
tgagaccattgtgggtgcnttcagcctcccggacca

SEQ ID NO: 189 - DNA, 36 bp, Homo sapiens
  misc_feature (18)..(18): n is a, c, g, or t
gctgcgcgccctgcaacntcatagccgacatcctct

SEQ ID NO: 190 - DNA, 36 bp, Homo sapiens
  misc_feature (19)..(19): n is a, c, g, or t
cctcccccaacagctatangggcagctccccaagtt

SEQ ID NO: 191 - DNA, 36 bp, Homo sapiens
  misc_feature (19)..(19): n is a, c, g, or t
aggagccagaaatgccatnctgacccagtgggaccg

SEQ ID NO: 192 - DNA, 36 bp, Homo sapiens
  misc_feature (19)..(19): n is a, c, g, or t
ggaccctgcaactcctatnagtatcgcctggttggg

SEQ ID NO: 193 - DNA, 36 bp, Homo sapiens
  misc_feature (18)..(18): n is a, c, g, or t
cggcgattctctgtgacnaccatgagggacttcggg

SEQ ID NO: 194 - DNA, 36 bp, Homo sapiens
  misc_feature (19)..(19): n is a, c, g, or t
catccgcaagttcctgtcngtgctggagcggcaatg

SEQ ID NO: 195 - DNA, 36 bp, Homo sapiens
  misc_feature (18)..(18): n is a, c, g, or t
cttttcaggcgtgtgcantagctcaaaagggaaggc

SEQ ID NO: 196 - DNA, 36 bp, Homo sapiens
  misc_feature (18)..(18): n is a, c, g, or t
gctggagacactgccttngactgtgcaacatctgct

SEQ ID NO: 197 - DNA, 36 bp, Homo sapiens
  misc_feature (7)..(7): n is a, c, g, or t
  misc_feature (19)..(19): n is a, c, g, or t
ctccaanagaagcgtgtcnggcaggtaccggtcctt

SEQ ID NO: 198 - DNA, 36 bp, Homo sapiens
  misc_feature (18)..(18): n is a, c, g, or t
atcagcaagcaggacgtntgcaagacactgtgcacg

SEQ ID NO: 199 - DNA, 36 bp, Homo sapiens
  misc_feature (19)..(19): n is a, c, g, or t
tctcacctctctgcttctngggctccatcccagctc

SEQ ID NO: 200 - DNA, 36 bp, Homo sapiens
  misc_feature (19)..(19): n is a, c, g, or t
cacggtacacctgggaccnaggcccgtggtcatgct

SEQ ID NO: 201 - DNA, 36 bp, Homo sapiens
  misc_feature (18)..(18): n is a, c, g, or t
aggcctgtgaggatggcnccatgtctgtagccttgg

SEQ ID NO: 202 - DNA, 36 bp, Homo sapiens
  misc_feature (19)..(19): n is a, c, g, or t
gtcagatacggcccattgnaaacccagagggctgca

SEQ ID NO: 203 - DNA, 36 bp, Homo sapiens
  misc_feature (19)..(19): n is a, c, g, or t
gaaacacctgccaggaccncagcaacaggcctttca

SEQ ID NO: 204 - DNA, 36 bp, Homo sapiens
  misc_feature (19)..(19): n is a, c, g, or t
acacccctcctttgaggangcccggggtctcccaca

SEQ ID NO: 205 - DNA, 36 bp, Homo sapiens
  misc_feature (19)..(19): n is a, c, g, or t
agcgacatcctaatgcacncaggggtgtgggcaggg

SEQ ID NO: 206 - DNA, 36 bp, Homo sapiens
  misc_feature (18)..(18): n is a, c, g, or t
tctgtgctgaacggaccnctatccagaaggccgtct

SEQ ID NO: 207 - DNA, 36 bp, Homo sapiens
  misc_feature (19)..(19): n is a, c, g, or t
tggctacaagatgtcgggnagtggccgggagttggg

SEQ ID NO: 208 - DNA, 36 bp, Homo sapiens
  misc_feature (18)..(18): n is a, c, g, or t
ggtgcaccaggcttccanagtatggctgctttgcat

SEQ ID NO: 209 - DNA, 36 bp, Homo sapiens
  misc_feature (19)..(19): n is a, c, g, or t
gacgctgggagtaaaaggngctggactgggtcagct

SEQ ID NO: 210 - DNA, 36 bp, Homo sapiens
  misc_feature (19)..(19): n is a, c, g, or t
acttctctccctgactgcngctcacactgccgtgag

SEQ ID NO: 211 - DNA, 36 bp, Homo sapiens
  misc_feature (18)..(18): n is a, c, g, or t
ctgctccacagtggaccnggtcatggccctggtttc

SEQ ID NO: 212 - DNA, 36 bp, Homo sapiens
  misc_feature (19)..(19): n is a, c, g, or t
gcagctggcagttatcatngtggggtcagccaaggt

SEQ ID NO: 213 - DNA, 36 bp, Homo sapiens
  misc_feature (18)..(18): n is a, c, g, or t
aaggcatcctcgggaccngtgtggttggtgctcagg

SEQ ID NO: 214 - DNA, 36 bp, Homo sapiens
  misc_feature (19)..(19): n is a, c, g, or t
  misc_feature (36)..(36): n is a, c, g, or t
gtgcacagtgaggacagancatgcttgtgcttctgn

SEQ ID NO: 215 - DNA, 36 bp, Homo sapiens
  misc_feature (19)..(19): n is a, c, g, or t
agatccactgcttcctgtngccgacccactcctcgg

SEQ ID NO: 216 - DNA, 36 bp, Homo sapiens
  misc_feature (18)..(18): n is a, c, g, or t
ttgcagaccgaggctccnttactgatccggccctac

SEQ ID NO: 217 - DNA, 36 bp, Homo sapiens
  misc_feature (19)..(19): n is a, c, g, or t
ggaatctgcgtgttcgtcnctctcctctttgcctgc

SEQ ID NO: 218 - DNA, 36 bp, Homo sapiens
  misc_feature (18)..(18): n is a, c, g, or t
ggcaaagaggagagcgangaacacgcagattcctgc

SEQ ID NO: 219 - DNA, 36 bp, Homo sapiens
  misc_feature (19)..(19): n is a, c, g, or t
gatataacgcctgggcagngttcgcaatagcagcca

SEQ ID NO: 220 - DNA, 36 bp, Homo sapiens
  misc_feature (18)..(18): n is a, c, g, or t
gggtgagctctgtgggcncaggacgcatggtagatg

SEQ ID NO: 221 - DNA, 36 bp, Homo sapiens
  misc_feature (18)..(18): n is a, c, g, or t
gaccgcgtgggccgcatntaccccatggccatgtca

SEQ ID NO: 222 - DNA, 36 bp, Homo sapiens
  misc_feature (19)..(19): n is a, c, g, or t
gggaactgtgctggtcaangcggtgtcgggcgtgct

SEQ ID NO: 223 - DNA, 36 bp, Homo sapiens
  misc_feature (19)..(19): n is a, c, g, or t
tttgaatgcgggcttcttntttggctctctcggtgt

SEQ ID NO: 224 - DNA, 36 bp, Homo sapiens
  misc_feature (19)..(19): n is a, c, g, or t
aggaacttgggcaggaagntggccatgcccgcagcc

SEQ ID NO: 225 - DNA, 36 bp, Homo sapiens
  misc_feature (19)..(19): n is a, c, g, or t
cctgctcatgactctcccncacttcatctcggagcc

SEQ ID NO: 226 - DNA, 37 bp, Homo sapiens
  misc_feature (20)..(20): n is a, c, g, or t
  misc_feature (30)..(30): n is a, c, g, or t
gtcttcttgatcacctgcantagctgcacntgttccg

SEQ ID NO: 227 - DNA, 37 bp, Homo sapiens
  misc_feature (18)..(18): n is a, c, g, or t
  misc_feature (20)..(20): n is a, c, g, or t
agtgtgcttgctcagganangggagatgtgatggact

SEQ ID NO: 228 - DNA, 37 bp, Homo sapiens
  misc_feature (19)..(19): n is a, c, g, or t
  misc_feature (21)..(21): n is a, c, g, or t
agccatttggggccattcnantggcagccttttcatc

SEQ ID NO: 229 - DNA, 37 bp, Homo sapiens
  misc_feature (18)..(19): n is a, c, g, or t
ctgaccgtctcggtgccnncaatgaagaggttcaacg

SEQ ID NO: 230 - DNA, 37 bp, Homo sapiens
  misc_feature (20)..(20): n is a, c, g, or t
  misc_feature (31)..(31): n is a, c, g, or t
tagaatgccttggatcccancactcagtccncttccc

SEQ ID NO: 231 - DNA, 37 bp, Homo sapiens
  misc_feature (19)..(19): n is a, c, g, or t
  misc_feature (31)..(31): n is a, c, g, or t
ggagaaatctcgtgcccanacctggtgatgnatccct

SEQ ID NO: 232 - DNA, 37 bp, Homo sapiens
  misc_feature (20)..(20): n is a, c, g, or t
  misc_feature (36)..(36): n is a, c, g, or t
aggcactttctgatagctcngagccacctggggtgnt

SEQ ID NO: 233 - DNA, 37 bp, Homo sapiens
  misc_feature (20)..(20): n is a, c, g, or t
  misc_feature (24)..(24): n is a, c, g, or t
cacatacctacccggatctnctcncccagccactcga

SEQ ID NO: 234 - DNA, 37 bp, Homo sapiens
  misc_feature (18)..(18): n is a, c, g, or t
  misc_feature (28)..(28): n is a, c, g, or t
tgcgcccatctgtgtggncatcgtcttnctgggtttc

SEQ ID NO: 235 - DNA, 37 bp, Homo sapiens
  misc_feature (20)..(20): n is a, c, g, or t
cggaccagaaagacacaganggagggcccaaggagga

SEQ ID NO: 236 - DNA, 37 bp, Homo sapiens
  misc_feature (19)..(19): n is a, c, g, or t
ctcccaaggagccattctntgtgtgactctgggtgga

SEQ ID NO: 237 - DNA, 37 bp, Homo sapiens
  misc_feature (18)..(18): n is a, c, g, or t
ctccccctgaagctgccnctccagcacacacacataa

SEQ ID NO: 238 - DNA, 37 bp, Homo sapiens
  misc_feature (18)..(18): n is a, c, g, or t
ggcctgctcaggtcccanaagagacccagatctctcc

SEQ ID NO: 239 - DNA, 37 bp, Homo sapiens
  misc_feature (20)..(20): n is a, c, g, or t
gaagatccagaaggagctgngtacatgggggccccca

SEQ ID NO: 240 - DNA, 37 bp, Homo sapiens
  misc_feature (18)..(18): n is a, c, g, or t
ctgaagcccgtggagcantgatctctacaggactgct

SEQ ID NO: 241 - DNA, 37 bp, Homo sapiens
  misc_feature (20)..(20): n is a, c, g, or t
gaataatgcctggcacacanaggtgctgtgcactgtt

SEQ ID NO: 242 - DNA, 37 bp, Homo sapiens
  misc_feature (18)..(18): n is a, c, g, or t
ggaaggggagagcttccnggaaggggatggaacttga

SEQ ID NO: 243 - DNA, 37 bp, Homo sapiens
  misc_feature (20)..(20): n is a, c, g, or t
cattcgttcctggacatgcngtggcactgccaggaga

SEQ ID NO: 244 - DNA, 37 bp, Homo sapiens
  misc_feature (18)..(18): n is a, c, g, or t
cttgtcctccgacctccnctcccatttgtgggaaagg

SEQ ID NO: 245 - DNA, 37 bp, Homo sapiens
  misc_feature (19)..(19): n is a, c, g, or t
gcttgaacccaggaggtgnaggttacagggagccaag

SEQ ID NO: 246 - DNA, 37 bp, Homo sapiens
  misc_feature (20)..(20): n is a, c, g, or t
gcagatggacctctacaggntggttcccatcagcctg

SEQ ID NO: 247 - DNA, 37 bp, Homo sapiens
  misc_feature (18)..(18): n is a, c, g, or t
gtcggtggaggagagcgnggtgttaaagtcccgggag

SEQ ID NO: 248 - DNA, 37 bp, Homo sapiens
  misc_feature (18)..(18): n is a, c, g, or t
catggactggtggggctngttgctgggtatcagcata

SEQ ID NO: 249 - DNA, 37 bp, Homo sapiens
  misc_feature (20)..(20): n is a, c, g, or t
gcttgatccagaagacacangagggcccccttcctct

SEQ ID NO: 250 - DNA, 37 bp, Homo sapiens
  misc_feature (20)..(20): n is a, c, g, or t
gcagactgtaccatgctgancattgcccatcgcctgc

SEQ ID NO: 251 - DNA, 37 bp, Homo sapiens
  misc_feature (19)..(19): n is a, c, g, or t
agctgggtacttccagagnatcactgtgggtgtggct

SEQ ID NO: 252 - DNA, 37 bp, Homo sapiens
  misc_feature (20)..(20): n is a, c, g, or t
ttgggttatcccacgaagtnacagaggctggtggcaa

SEQ ID NO: 253 - DNA, 37 bp, Homo sapiens
  misc_feature (20)..(20): n is a, c, g, or t
atattgcttccattgggctncacgacctccgagagaa

SEQ ID NO: 254 - DNA, 37 bp, Homo sapiens
  misc_feature (18)..(18): n is a, c, g, or t
agatccagctcaggtcgntaccgcacttggtagttgt

SEQ ID NO: 255 - DNA, 37 bp, Homo sapiens
  misc_feature (20)..(20): n is a, c, g, or t
gtgactgataagaggcctcngccagattggcccagca

SEQ ID NO: 256 - DNA, 37 bp, Homo sapiens
  misc_feature (20)..(20): n is a, c, g, or t
gagcaagtttgaaacgcacntgaagagagagctgcag

SEQ ID NO: 257 - DNA, 37 bp, Homo sapiens
  misc_feature (20)..(20): n is a, c, g, or t
tcggatgaagaagtctggangtccctggagctggccc

SEQ ID NO: 258 - DNA, 37 bp, Homo sapiens
  misc_feature (19)..(19): n is a, c, g, or t
ggctcttccaagagctgtngcactcagtacaactgca

SEQ ID NO: 259 - DNA, 37 bp, Homo sapiens
  misc_feature (20)..(20): n is a, c, g, or t
cactaccccatgttgacccncagcgctggggttttgg

SEQ ID NO: 260 - DNA, 37 bp, Homo sapiens
  misc_feature (18)..(18): n is a, c, g, or t
tggtgctcccagacagcngagtcatccccaaaggtgc

SEQ ID NO: 261 - DNA, 37 bp, Homo sapiens
  misc_feature (18)..(18): n is a, c, g, or t
cgctgtcggcaggaggtncaagagcttctgaaggacc

SEQ ID NO: 262 - DNA, 37 bp, Homo sapiens
  misc_feature (18)..(18): n is a, c, g, or t
aggaggggggagatgggncccatccagaccttaaagc

SEQ ID NO: 263 - DNA, 37 bp, Homo sapiens
  misc_feature (18)..(18): n is a, c, g, or t
aacccggtgcaaaacggnaagggtcaaacacctgcag

SEQ ID NO: 264 - DNA, 37 bp, Homo sapiens
  misc_feature (20)..(20): n is a, c, g, or t
tcaccatctacctgggaccntggcggcctgtggtggt

SEQ ID NO: 265 - DNA, 37 bp, Homo sapiens
  misc_feature (20)..(20): n is a, c, g, or t
gggagaattgcaggtgacancacaggagcagccaaac

SEQ ID NO: 266 - DNA, 37 bp, Homo sapiens
  misc_feature (18)..(18): n is a, c, g, or t
gctgctcatgaagcaccnagaggtggagggtaagact

SEQ ID NO: 267 - DNA, 37 bp, Homo sapiens
  misc_feature (18)..(18): n is a, c, g, or t
gaggctcgggaagatgtngtacaactggggaccagac

SEQ ID NO: 268 - DNA, 37 bp, Homo sapiens
  misc_feature (18)..(18): n is a, c, g, or t
gtgcagcgccgtcaaatnggtcaggatcatggtaccc

SEQ ID NO: 269 - DNA, 37 bp, Homo sapiens
  misc_feature (18)..(18): n is a, c, g, or t
gcagctggtcccttgccnggatgccctgatgttcagg

SEQ ID NO: 270 - DNA, 37 bp, Homo sapiens
  misc_feature (20)..(20): n is a, c, g, or t
cgagtagaggaaaacctgtnccaatgtctgcggacgg

SEQ ID NO: 271 - DNA, 37 bp, Homo sapiens
  misc_feature (7)..(7): n is a, c, g, or t
  misc_feature (19)..(19): n is a, c, g, or t
cgtggtngaagttcctgcnggagcccctgatgtctag

SEQ ID NO: 272 - DNA, 37 bp, Homo sapiens
  misc_feature (18)..(18): n is a, c, g, or t
ccagcatcgtggcggagntcctgttgaatgcggaact

SEQ ID NO: 273 - DNA, 37 bp, Homo sapiens
  misc_feature (19)..(19): n is a, c, g, or t
agggagcagggttatgagnacctgcacctggaagtac

SEQ ID NO: 274 - DNA, 37 bp, Homo sapiens
  misc_feature (20)..(20): n is a, c, g, or t
gctgggtacactctcaaacngggtgcttcctctccct

SEQ ID NO: 275 - DNA, 37 bp, Homo sapiens
  misc_feature (20)..(20): n is a, c, g, or t
agcatctcagagtccagtcnagttccctcctgcagcc

SEQ ID NO: 276 - DNA, 37 bp, Homo sapiens
  misc_feature (20)..(20): n is a, c, g, or t
acgtgtgattggcagaaacnggagcccctgcatgcaa

SEQ ID NO: 277 - DNA, 37 bp, Homo sapiens
  misc_feature (19)..(19): n is a, c, g, or t
cagtcctggtcaaaggctnccagacctttctgagtgc

SEQ ID NO: 278 - DNA, 37 bp, Homo sapiens
  misc_feature (19)..(19): n is a, c, g, or t
tcccaggagtctgtagagnatgccacggtaatcgtgg

SEQ ID NO: 279 - DNA, 37 bp, Homo sapiens
  misc_feature (19)..(19): n is a, c, g, or t
ccctgcagccatcactaangtcatttttggggagcgc

SEQ ID NO: 280 - DNA, 37 bp, Homo sapiens
  misc_feature (18)..(18): n is a, c, g, or t
agccaggcccaggaccgngtccactcagctgatgtct

SEQ ID NO: 281 - DNA, 37 bp, Homo sapiens
  misc_feature (18)..(18): n is a, c, g, or t
tgcccatggcagacgggngagaattcaacctgcgacg

SEQ ID NO: 282 - DNA, 37 bp, Homo sapiens
  misc_feature (18)..(18): n is a, c, g, or t
ggcccggattttgcccantaagaaccgagacgaactg

SEQ ID NO: 283 - DNA, 37 bp, Homo sapiens
  misc_feature (5)..(5): n is a, c, g, or t
  misc_feature (18)..(18): n is a, c, g, or t
agaangctgtcggctacngacttgaactccaaacccg

SEQ ID NO: 284 - DNA, 37 bp, Homo sapiens
  misc_feature (18)..(18): n is a, c, g, or t
cctcctgcagaccctaangcccctgatgtgtatgact

SEQ ID NO: 285 - DNA, 37 bp, Homo sapiens
  misc_feature (18)..(18): n is a, c, g, or t
tgctcagggtacagggcnatgcagtagagaaaccagg

SEQ ID NO: 286 - DNA, 37 bp, Homo sapiens
  misc_feature (18)..(18): n is a, c, g, or t
accctgagcaccagcatngttgtagagaggaggtccg

SEQ ID NO: 287 - DNA, 37 bp, Homo sapiens
  misc_feature (19)..(19): n is a, c, g, or t
tgaatcactgctgtgcagngcaggaaagctccacaca

SEQ ID NO: 288 - DNA, 37 bp, Homo sapiens
  misc_feature (18)..(18): n is a, c, g, or t
cccccaacctgcctcatnacacacaccttcctcctcc

SEQ ID NO: 289 - DNA, 37 bp, Homo sapiens
  misc_feature (18)..(18): n is a, c, g, or t
ggagaagcgcatggcttnataaaggaaggccaggaca

SEQ ID NO: 290 - DNA, 37 bp, Homo sapiens
  misc_feature (20)..(20): n is a, c, g, or t
agaattggatcaggtcgtgnggagggaccgtctgcct

SEQ ID NO: 291 - DNA, 37 bp, Homo sapiens
  misc_feature (19)..(19): n is a, c, g, or t
ttctcctgacagtgctcantcaggctgtctgtgatgt

SEQ ID NO: 292 - DNA, 37 bp, Homo sapiens
  misc_feature (18)..(18): n is a, c, g, or t
tgcctgtctctgcttccngcctcagatttctcaccaa

SEQ ID NO: 293 - DNA, 37 bp, Homo sapiens
  misc_feature (19)..(19): n is a, c, g, or t
agcctgagaagttcctccntgaaaggtacaaggcccc

SEQ ID NO: 294 - DNA, 37 bp, Homo sapiens
  misc_feature (20)..(20): n is a, c, g, or t
accaaccttccctccaacanggccttccggggctttg

SEQ ID NO: 295 - DNA, 37 bp, Homo sapiens
  misc_feature (20)..(20): n is a, c, g, or t
tgcagatgctgtttttcccngtggtgagctgctggct

SEQ ID NO: 296 - DNA, 37 bp, Homo sapiens
  misc_feature (20)..(20): n is a, c, g, or t
accaaaactttgggaaccgncccgtgacccctatgcg

SEQ ID NO: 297 - DNA, 37 bp, Homo sapiens
  misc_feature (18)..(18): n is a, c, g, or t
caggtcacccgatgaccngtgcctttatcacccatgc

SEQ ID NO: 298 - DNA, 37 bp, Homo sapiens
  misc_feature (19)..(19): n is a, c, g, or t
gcgacgtggtttattcccngtatgcaacccttgcctc

SEQ ID NO: 299 - DNA, 37 bp, Homo sapiens
  misc_feature (18)..(18): n is a, c, g, or t
ccttccacagcagcgacnctcctgaccaccactttgg

SEQ ID NO: 300 - DNA, 37 bp, Homo sapiens
  misc_feature (20)..(20): n is a, c, g, or t
tggagttccccgttgtctanccagtgccaaagggcag

SEQ ID NO: 301 - DNA, 37 bp, Homo sapiens
  misc_feature (12)..(12): n is a, c, g, or t
  misc_feature (19)..(19): n is a, c, g, or t
tgtgagaggggntcctggngtcactgcagagggagtg

SEQ ID NO: 302 - DNA, 37 bp, Homo sapiens
  misc_feature (19)..(19): n is a, c, g, or t
ggcccacaaagccagaaanctggcacgtcttaccaaa

SEQ ID NO: 303 - DNA, 37 bp, Homo sapiens
  misc_feature (20)..(20): n is a, c, g, or t
ttagagcttgtagccaaganatcgaacctcgagaacg

SEQ ID NO: 304 - DNA, 37 bp, Homo sapiens
  misc_feature (18)..(18): n is a, c, g, or t
tggtgtctggcaggaggngggcaaggatgactatgtg

SEQ ID NO: 305 - DNA, 37 bp, Homo sapiens
  misc_feature (15)..(15): n is a, c, g, or t
  misc_feature (20)..(20): n is a, c, g, or t
tgtgactatgggctntgaanggggcaggagtcagcaa

SEQ ID NO: 306 - DNA, 37 bp, Homo sapiens
  misc_feature (18)..(18): n is a, c, g, or t
gcacgaggtccagagatncattgaccttctccccacc

SEQ ID NO: 307 - DNA, 37 bp, Homo sapiens
  misc_feature (18)..(18): n is a, c, g, or t
atgtaccgcaggatggcnttgctctgggtgatcttgt

SEQ ID NO: 308 - DNA, 37 bp, Homo sapiens
  misc_feature (20)..(20): n is a, c, g, or t
catcctccagaacttctccntggccagccccgtggcc

SEQ ID NO: 309 - DNA, 37 bp, Homo sapiens
  misc_feature (1)..(1): n is a, c, g, or t
  misc_feature (18)..(18): n is a, c, g, or t
nggaggacgacagcatcngccctttcaaggtggaaac

SEQ ID NO: 310 - DNA, 37 bp, Homo sapiens
  misc_feature (19)..(19): n is a, c, g, or t
acaggcaagatcgtggacnccgtgattcaggagcacc

SEQ ID NO: 311 - DNA, 37 bp, Homo sapiens
  misc_feature (18)..(18): n is a, c, g, or t
atcggcaagccaatcgangccttccatacttcgtcta

SEQ ID NO: 312 - DNA, 37 bp, Homo sapiens
  misc_feature (20)..(20): n is a, c, g, or t
agagccaggattcaacctcngcgagcctggtggtgct

SEQ ID NO: 313 - DNA, 37 bp, Homo sapiens
  misc_feature (19)..(19): n is a, c, g, or t
ctggtgggacttctccccnacgggcactctgtacttt

SEQ ID NO: 314 - DNA, 37 bp, Homo sapiens
  misc_feature (20)..(20): n is a, c, g, or t
ggtatctcagaggggacgtncctcctcctccctgtgc

SEQ ID NO: 315 - DNA, 37 bp, Homo sapiens
  misc_feature (18)..(18): n is a, c, g, or t
ggctgtgcccaccttcanttcctcaggaatgtgcttc

SEQ ID NO: 316 - DNA, 37 bp, Homo sapiens
  misc_feature (18)..(18): n is a, c, g, or t
ttcgtgcgctacctcggngatccgaaccacagatggc

SEQ ID NO: 317 - DNA, 37 bp, Homo sapiens
  misc_feature (19)..(19): n is a, c, g, or t
gaggaaccggacagagacncgggggatccagtttgaa

SEQ ID NO: 318 - DNA, 37 bp, Homo sapiens
  misc_feature (19)..(19): n is a, c, g, or t
tgatgggtgaagccacccngactagccaggagaacct

SEQ ID NO: 319 - DNA, 37 bp, Homo sapiens
  misc_feature (20)..(20): n is a, c, g, or t
tctgtgtggttgttggggtnttgcctgccagtgttca

SEQ ID NO: 320 - DNA, 37 bp, Homo sapiens
  misc_feature (20)..(20): n is a, c, g, or t
gtccttcaacgaggtcactnctggtgaggagcagcgg

SEQ ID NO: 321 - DNA, 37 bp, Homo sapiens
  misc_feature (20)..(20): n is a, c, g, or t
tctccctctaatgggtccancttctccctgcccacca

SEQ ID NO: 322 - DNA, 37 bp, Homo sapiens
  misc_feature (19)..(19): n is a, c, g, or t
tactccattctcccctgcncctcctcctctgtgttct

SEQ ID NO: 323 - DNA, 37 bp, Homo sapiens
  misc_feature (20)..(20): n is a, c, g, or t
gctccctccatttactcacnaggcggggcaggcccag

SEQ ID NO: 324 - DNA, 37 bp, Homo sapiens
  misc_feature (18)..(18): n is a, c, g, or t
gagcagctgatccccttngcaggaatctgcatgttca

SEQ ID NO: 325 - DNA, 37 bp, Homo sapiens
  misc_feature (20)..(20): n is a, c, g, or t
tgctttctttttagcgtcantccagagttcagcccag

SEQ ID NO: 326 - DNA, 37 bp, Homo sapiens
  misc_feature (20)..(20): n is a, c, g, or t
tgtccctcttgaacacgacnctcagcagcagtagctt

SEQ ID NO: 327 - DNA, 37 bp, Homo sapiens
  misc_feature (20)..(20): n is a, c, g, or t
catctgctcctacatcctgnggcctgtagccttcttg

SEQ ID NO: 328 - DNA, 37 bp, Homo sapiens
  misc_feature (18)..(18): n is a, c, g, or t
acctggaagctgagcccntggatgtccaccatgtctc

SEQ ID NO: 329 - DNA, 37 bp, Homo sapiens
  misc_feature (19)..(19): n is a, c, g, or t
gcagatcgatgccacctcnttgattgcagcctctgtg

SEQ ID NO: 330 - DNA, 37 bp, Homo sapiens
  misc_feature (20)..(20): n is a, c, g, or t
agacgaagagagtccatctntctcacacctgtggcca

SEQ ID NO: 331 - DNA, 37 bp, Homo sapiens
  misc_feature (20)..(20): n is a, c, g, or t
aggtctgggacatggagaangacccctcgagacgaag

SEQ ID NO: 332 - DNA, 37 bp, Homo sapiens
  misc_feature (20)..(20): n is a, c, g, or t
ctgccactatattgcttgcngcaaaggggaggcgtcg

SEQ ID NO: 333 - DNA, 37 bp, Homo sapiens
  misc_feature (18)..(18): n is a, c, g, or t
ggggttgtggtggccttngcaccaaacttccctgtgt

SEQ ID NO: 334 - DNA, 37 bp, Homo sapiens
  misc_feature (20)..(20): n is a, c, g, or t
gatcatcctcaccatcgacngcatcggacgccgttac

SEQ ID NO: 335 - DNA, 37 bp, Homo sapiens
  misc_feature (18)..(18): n is a, c, g, or t
gcatctaccccatggccntgtcaaatttgttggcggg

SEQ ID NO: 336 - DNA, 37 bp, Homo sapiens
  misc_feature (10)..(10): n is a, c, g, or t
  misc_feature (20)..(20): n is a, c, g, or t
gtgtaggggncctgagttcngggctttgctacccagc

SEQ ID NO: 337 - DNA, 38 bp, Homo sapiens
  misc_feature (19)..(19): n is a, c, g, or t
  misc_feature (24)..(24): n is a, c, g, or t
tggactctggctagagttntgaanttgggaccagggtc

SEQ ID NO: 338 - DNA, 38 bp, Homo sapiens
  misc_feature (20)..(21): n is a, c, g, or t
tgagccttcagatgacaccnnccccgtcttcatttgac

SEQ ID NO: 339 - DNA, 38 bp, Homo sapiens
  misc_feature (19)..(19): n is a, c, g, or t
  misc_feature (25)..(25): n is a, c, g, or t
cgggaaggattgcatcacnatacanagtgccaccttcg

SEQ ID NO: 340 - DNA, 38 bp, Homo sapiens
  misc_feature (21)..(21): n is a, c, g, or t
  misc_feature (29)..(29): n is a, c, g, or t
ggttggggggattggtgaaantacacagnggctgcagg

SEQ ID NO: 341 - DNA, 38 bp, Homo sapiens
  misc_feature (18)..(18): n is a, c, g, or t
  misc_feature (36)..(36): n is a, c, g, or t
caaacagggctgccttcnggccttgtaagacccttntt

SEQ ID NO: 342 - DNA, 38 bp, Homo sapiens
  misc_feature (20)..(20): n is a, c, g, or t
  misc_feature (25)..(25): n is a, c, g, or t
ttcttgctggtctagtcacncatgnagtgttggggatg

SEQ ID NO: 343 - DNA, 38 bp, Homo sapiens
  misc_feature (18)..(18): n is a, c, g, or t
  misc_feature (35)..(35): n is a, c, g, or t
acgaggcaggctgccccngccaacaaatttgacanggc

SEQ ID NO: 344 - DNA, 37 bp, Homo sapiens
  misc_feature (20)..(20): n is a, c, g, or t
tgggttttgcaaacacaggntccctctgcagcagcat

SEQ ID NO: 345 - DNA, 38 bp, Homo sapiens
  misc_feature (21)..(21): n is a, c, g, or t
gctgttggtatgatcctagcntgcctggcattgcagtt

SEQ ID NO: 346 - DNA, 38 bp, Homo sapiens
  misc_feature (18)..(18): n is a, c, g, or t
catcctgcctgaagcacngacttcatgttggaaggagc

SEQ ID NO: 347 - DNA, 38 bp, Homo sapiens
  misc_feature (18)..(18): n is a, c, g, or t
tcgggggtgccatcatgnttgtggtctgtgaggtcatt

SEQ ID NO: 348 - DNA, 38 bp, Homo sapiens
  misc_feature (19)..(19): n is a, c, g, or t
tgtagctgctgcaattccngtgaatacccgaaacctgc

SEQ ID NO: 349 - DNA, 38 bp, Homo sapiens
  misc_feature (21)..(21): n is a, c, g, or t
accttaccagtttttctgccnctgccccctttctgctt

SEQ ID NO: 350 - DNA, 38 bp, Homo sapiens
  misc_feature (21)..(21): n is a, c, g, or t
ctggtgcttctcaagtttaanacccaggggcgagtggt

SEQ ID NO: 351 - DNA, 38 bp, Homo sapiens
  misc_feature (20)..(20): n is a, c, g, or t
actgccagaaaatgactccngtgtgctgaagacagcca

SEQ ID NO: 352 - DNA, 38 bp, Homo sapiens
  misc_feature (19)..(19): n is a, c, g, or t
gctgagagatgccaacgangtaaaggaaaggcctgctc

SEQ ID NO: 353 - DNA, 38 bp, Homo sapiens
  misc_feature (19)..(19): n is a, c, g, or t
gggttccccaaattggccnaggaattccaagggcagtc

SEQ ID NO: 354 - DNA, 38 bp, Homo sapiens
  misc_feature (18)..(18): n is a, c, g, or t
gggcagcgactgcacccntatcagagtgtggaaagcct

SEQ ID NO: 355 - DNA, 38 bp, Homo sapiens
  misc_feature (18)..(18): n is a, c, g, or t
gtggcccagctagttccntggagcccttttataagagc

SEQ ID NO: 356 - DNA, 38 bp, Homo sapiens
  misc_feature (19)..(19): n is a, c, g, or t
catcgtgttgtctggccanttcctctattgtgtgcagg

SEQ ID NO: 357 - DNA, 38 bp, Homo sapiens
  misc_feature (18)..(18): n is a, c, g, or t
ggcccacagacagggtcnggacacagacagcatcaatt

SEQ ID NO: 358 - DNA, 38 bp, Homo sapiens
  misc_feature (19)..(19): n is a, c, g, or t
ttcccgttggttccgaaanttggaataggtgccaagga

SEQ ID NO: 359 - DNA, 38 bp, Homo sapiens
  misc_feature (16)..(16): n is a, c, g, or t
  misc_feature (18)..(18): n is a, c, g, or t
tgtgcttgctcagganangggagatgtgatggacttct

SEQ ID NO: 360 - DNA, 38 bp, Homo sapiens
  misc_feature (21)..(21): n is a, c, g, or t
ggtatcttagcccaaagtccnggaactcgatctgcccg

SEQ ID NO: 361 - DNA, 38 bp, Homo sapiens
  misc_feature (18)..(18): n is a, c, g, or t
gtcattgggcctggtggnctactccagggaacagtaag

SEQ ID NO: 362 - DNA, 38 bp, Homo sapiens
  misc_feature (20)..(20): n is a, c, g, or t
  misc_feature (38)..(38): n is a, c, g, or t
agaacgcagagatgaggtancgagaaaacctccctctn

SEQ ID NO: 363 - DNA, 38 bp, Homo sapiens
  misc_feature (18)..(18): n is a, c, g, or t
acttccctgaggctgggngtctatgctgctttaggaat

SEQ ID NO: 364 - DNA, 38 bp, Homo sapiens
  misc_feature (18)..(18): n is a, c, g, or t
atcgcccacaggctgcanaccatcatggacagtgacaa

SEQ ID NO: 365 - DNA, 38 bp, Homo sapiens
  misc_feature (20)..(20): n is a, c, g, or t
cttctagatgaccccctgtntgcagtggatgctcatgt

SEQ ID NO: 366 - DNA, 38 bp, Homo sapiens
  misc_feature (14)..(14): n is a, c, g, or t
  misc_feature (20)..(20): n is a, c, g, or t
gcatcaccttctcnatcccngaaggtgctttggtggcc

SEQ ID NO: 367 - DNA, 38 bp, Homo sapiens
  misc_feature (18)..(18): n is a, c, g, or t
cgacggcctgtcaaaganggtgtgtgtgtgttcagtcc

SEQ ID NO: 368 - DNA, 38 bp, Homo sapiens
  misc_feature (18)..(18): n is a, c, g, or t
aggcagccggtgaaggtngtgtactcctccaaggatcc

SEQ ID NO: 369 - DNA, 38 bp, Homo sapiens
  misc_feature (19)..(19): n is a, c, g, or t
gggcagacctcttctactntttctgggaaagaagtcgg

SEQ ID NO: 370 - DNA, 38 bp, Homo sapiens
  misc_feature (19)..(19): n is a, c, g, or t
tgaggctgtggtttctccncaggctgagatggatcttg

SEQ ID NO: 371 - DNA, 38 bp, Homo sapiens
  misc_feature (18)..(18): n is a, c, g, or t
ctaggactctctgcagcngtttgggcaaaggtatgtga

SEQ ID NO: 372 - DNA, 38 bp, Homo sapiens
  misc_feature (18)..(18): n is a, c, g, or t
tacacagaggcgggtctntaacaggcaatcaacaaacg

SEQ ID NO: 373 - DNA, 38 bp, Homo sapiens
  misc_feature (21)..(21): n is a, c, g, or t
gtgtccaagtttacggactangagctgaaggcctatgc

SEQ ID NO: 374 - DNA, 38 bp, Homo sapiens
  misc_feature (21)..(21): n is a, c, g, or t
gtggtgtcacaggaagagatngtgagggcagcaaagga

SEQ ID NO: 375 - DNA, 38 bp, Homo sapiens
  misc_feature (21)..(21): n is a, c, g, or t
tttgttttgttttgcaggctntaggttccaggcttgct

SEQ ID NO: 376 - DNA, 38 bp, Homo sapiens
  misc_feature (19)..(19): n is a, c, g, or t
ctgcaccttcaggttcagncccttcaagatctaccagg

SEQ ID NO: 377 - DNA, 38 bp, Homo sapiens
  misc_feature (19)..(19): n is a, c, g, or t
ccagatggtacctgaggcnttgatgacagaccggatga

SEQ ID NO: 378 - DNA, 38 bp, Homo sapiens
  misc_feature (21)..(21): n is a, c, g, or t
tcacctctggcttttattccnttctccgcagggcccag

SEQ ID NO: 379 - DNA, 38 bp, Homo sapiens
  misc_feature (20)..(20): n is a, c, g, or t
ctattcccagggctttacgntatggctgggtcccatca

SEQ ID NO: 380 - DNA, 38 bp, Homo sapiens
  misc_feature (20)..(20): n is a, c, g, or t
ggctcagagacaaatcacangcagaccctacccttgag

SEQ ID NO: 381 - DNA, 38 bp, Homo sapiens
  misc_feature (21)..(21): n is a, c, g, or t
cacgttgaacctcttcattgnaggcaccgagacggtca

SEQ ID NO: 382 - DNA, 38 bp, Homo sapiens
  misc_feature (1)..(1): n is a, c, g, or t
  misc_feature (20)..(20): n is a, c, g, or t
naaggggcagtttaagaagngtgatgcttttgtgccct

SEQ ID NO: 383 - DNA, 38 bp, Homo sapiens
  misc_feature (21)..(21): n is a, c, g, or t
ctgggaaatgtgacagagttnctattggcgggagtgga

SEQ ID NO: 384 - DNA, 38 bp, Homo sapiens
  misc_feature (18)..(18): n is a, c, g, or t
gaacaggctcccaggccnttctaagcacctgaagatgg

SEQ ID NO: 385 - DNA, 38 bp, Homo sapiens
  misc_feature (19)..(19): n is a, c, g, or t
gacccagctcatctcaccntcagtaagctatttgccct

SEQ ID NO: 386 - DNA, 38 bp, Homo sapiens
  misc_feature (20)..(20): n is a, c, g, or t
cacagctcttctactccacngctgtctatcttgcctgc

SEQ ID NO: 387 - DNA, 38 bp, Homo sapiens
  misc_feature (20)..(20): n is a, c, g, or t
  misc_feature (38)..(38): n is a, c, g, or t
tggcttctagtgacagttcngccttcaacaggagctcn

SEQ ID NO: 388 - DNA, 38 bp, Homo sapiens
  misc_feature (21)..(21): n is a, c, g, or t
tgaaaatggggatgtcagganaagtgaccacaggggcc

SEQ ID NO: 389 - DNA, 38 bp, Homo sapiens
  misc_feature (21)..(21): n is a, c, g, or t
  misc_feature (38)..(38): n is a, c, g, or t
acatgtgcagtgtcaaaagtngcctgtggaagctgctn

SEQ ID NO: 390 - DNA, 38 bp, Homo sapiens
  misc_feature (19)..(19): n is a, c, g, or t
tccacattacagccccagngatgaaaaggccaggatga

SEQ ID NO: 391 - DNA, 38 bp, Homo sapiens
  misc_feature (18)..(18): n is a, c, g, or t
tgaaggcctggcccacantctcatccacagtcaaaggc

SEQ ID NO: 392 - DNA, 38 bp, Homo sapiens
  misc_feature (18)..(18): n is a, c, g, or t
gccaagcctgcgaccttntcctggctcatttaaaacgc

SEQ ID NO: 393 - DNA, 38 bp, Homo sapiens
  misc_feature (18)..(18): n is a, c, g, or t
ctggccaagcccggagancttcaaccctgaaaggtgag

SEQ ID NO: 394 - DNA, 38 bp, Homo sapiens
  misc_feature (18)..(18): n is a, c, g, or t
agcactggccaagcccgnagaccttcaaccctgaaagg

SEQ ID NO: 395 - DNA, 38 bp, Homo sapiens
  misc_feature (21)..(21): n is a, c, g, or t
cactttcttttgccacctacntactggccaccaaccct

SEQ ID NO: 396 - DNA, 38 bp, Homo sapiens
  misc_feature (18)..(18): n is a, c, g, or t
atcagccaagcctgcgancttctcctggctcatttaaa

SEQ ID NO: 397 - DNA, 38 bp, Homo sapiens
  misc_feature (20)..(20): n is a, c, g, or t
gcacgaggtccagagatacnttgaccttctccccacca

SEQ ID NO: 398 - DNA, 38 bp, Homo sapiens
  misc_feature (18)..(18): n is a, c, g, or t
ccagcaaacagcagcacnctgctgaaaaaaagactcag

SEQ ID NO: 399 - DNA, 38 bp, Homo sapiens
  misc_feature (21)..(21): n is a, c, g, or t
tgagtggtgtgtgtgtgattntttgccaactgccgagg

SEQ ID NO: 400 - DNA, 38 bp, Homo sapiens
  misc_feature (18)..(18): n is a, c, g, or t
gctctctcacctgggcanatgttcccatccccaactta

SEQ ID NO: 401 - DNA, 38 bp, Homo sapiens
  misc_feature (21)..(21): n is a, c, g, or t
ttttttcagtgggcaaaaggnggtgcattggcgaagaa

SEQ ID NO: 402 - DNA, 38 bp, Homo sapiens
  misc_feature (21)..(21): n is a, c, g, or t
ggtctgtgaatcatgacccantgaagtggcctaacccg

SEQ ID NO: 403 - DNA, 38 bp, Homo sapiens
  misc_feature (20)..(20): n is a, c, g, or t
cctacctaagggccacatcngggacatcacagacagcc

SEQ ID NO: 404 - DNA, 38 bp, Homo sapiens
  misc_feature (20)..(20): n is a, c, g, or t
ccttccgacactcttccttngtccccttcaccatcccc

SEQ ID NO: 405 - DNA, 38 bp, Homo sapiens
  misc_feature (20)..(20): n is a, c, g, or t
ccctctttttcaggcagtanaaaggcaaaccaccccag

SEQ ID NO: 406 - DNA, 38 bp, Homo sapiens
  misc_feature (16)..(16): n is a, c, g, or t
  misc_feature (18)..(18): n is a, c, g, or t
aagccccggaaggccntnttggagggaaggttggtttt

SEQ ID NO: 407 - DNA, 38 bp, Homo sapiens
  misc_feature (21)..(21): n is a, c, g, or t
tccccaggggagatatacatnggtggccaagagcactt

SEQ ID NO: 408 - DNA, 38 bp, Homo sapiens
  misc_feature (19)..(19): n is a, c, g, or t
gctgtgtactgacgtagcnctggaattcccaagaccca

SEQ ID NO: 409 - DNA, 38 bp, Homo sapiens
  misc_feature (21)..(21): n is a, c, g, or t
tttcacatcctccctttggantggcacagggtacgtct

SEQ ID NO: 410 - DNA, 38 bp, Homo sapiens
  misc_feature (20)..(20): n is a, c, g, or t
ctgaaggaattctgaggcangggttgcatacggggaat

SEQ ID NO: 411 - DNA, 38 bp, Homo sapiens
  misc_feature (19)..(19): n is a, c, g, or t
gacctcacctggtaccagnaccattccttggacgtgat

SEQ ID NO: 412 - DNA, 38 bp, Homo sapiens
  misc_feature (19)..(19): n is a, c, g, or t
ctggaagtctctggcaganggacgtccattctgaagac

SEQ ID NO: 413 - DNA, 38 bp, Homo sapiens
  misc_feature (21)..(21): n is a, c, g, or t
ccagattctggacatgatctnccagggcggtgacctgg

SEQ ID NO: 414 - DNA, 38 bp, Homo sapiens
  misc_feature (19)..(19): n is a, c, g, or t
gcctcccaagtagctaggnctacagacatgtgcaacca

SEQ ID NO: 415 - DNA, 38 bp, Homo sapiens
  misc_feature (21)..(21): n is a, c, g, or t
ttcaactatgccatgaaggangctgctgcagcggcttt

SEQ ID NO: 416 - DNA, 38 bp, Homo sapiens
  misc_feature (20)..(20): n is a, c, g, or t
ccttcttggttcaggagagntgcagtgttaggtgcagc

SEQ ID NO: 417 - DNA, 38 bp, Homo sapiens
  misc_feature (19)..(19): n is a, c, g, or t
gtggcagcctctagaattnatttctgggaaggatcagc

SEQ ID NO: 418 - DNA, 38 bp, Homo sapiens
  misc_feature (18)..(18): n is a, c, g, or t
gcttccagacccagcatngacaatgtaattcctgccgt

SEQ ID NO: 419 - DNA, 38 bp, Homo sapiens
  misc_feature (21)..(21): n is a, c, g, or t
caatgtaattcctgccgtcantggtcacctgcaggaga

SEQ ID NO: 420 - DNA, 38 bp, Homo sapiens
  misc_feature (19)..(19): n is a, c, g, or t
ttctcctagggcacagtcntagtgccaactctggactc

SEQ ID NO: 421 - DNA, 38 bp, Homo sapiens
  misc_feature (18)..(18): n is a, c, g, or t
ggcggcacagaggcaaanccattgacaatggagtggtg

SEQ ID NO: 422 - DNA, 38 bp, Homo sapiens
  misc_feature (18)..(18): n is a, c, g, or t
ccgccctacaccgtggtntatttcccagttcgaggtag

SEQ ID NO: 423 - DNA, 38 bp, Homo sapiens
  misc_feature (18)..(18): n is a, c, g, or t
gtgggagaagccctggcnggcatggagctgtttttatt

SEQ ID NO: 424 - DNA, 38 bp, Homo sapiens
  misc_feature (21)..(21): n is a, c, g, or t
gcaagaccttcattgtggganaccaggtgagcatctgg

SEQ ID NO: 425 - DNA, 38 bp, Homo sapiens
  misc_feature (18)..(18): n is a, c, g, or t
agtctcagccctgcttantagtgagaaagactggcaag

SEQ ID NO: 426 - DNA, 38 bp, Homo sapiens
  misc_feature (18)..(18): n is a, c, g, or t
ctgctcgtcactcgattnggaaccttcctcaagaacaa

SEQ ID NO: 427 - DNA, 38 bp, Homo sapiens
  misc_feature (21)..(21): n is a, c, g, or t
cagcagaacaggtactactcnccgggtactcgggtgac

SEQ ID NO: 428 - DNA, 38 bp, Homo sapiens
  misc_feature (19)..(19): n is a, c, g, or t
cggagcatagaacgaaacngggtgtggaacactgagtc

SEQ ID NO: 429 - DNA, 38 bp, Homo sapiens
  misc_feature (19)..(19): n is a, c, g, or t
ggacaagtcaaccctcgcntgcattggtctcatccagc

SEQ ID NO: 430 - DNA, 38 bp, Homo sapiens
  misc_feature (18)..(18): n is a, c, g, or t
gacgacctgctgaccaangtcatgctctactggacaac

SEQ ID NO: 431 - DNA, 38 bp, Homo sapiens
  misc_feature (7)..(7): n is a, c, g, or t
  misc_feature (20)..(20): n is a, c, g, or t
cctactngcggaatgaattngactggaagaagcaggtg

SEQ ID NO: 432 - DNA, 38 bp, Homo sapiens
  misc_feature (19)..(19): n is a, c, g, or t
gcttcaaaagctcttcgantcattgatgtgctggtggc

SEQ ID NO: 433 - DNA, 38 bp, Homo sapiens
  misc_feature (20)..(20): n is a, c, g, or t
tgatgttggcggtaatggantggaagaggaaggtgggg

SEQ ID NO: 434 - DNA, 38 bp, Homo sapiens
  misc_feature (18)..(18): n is a, c, g, or t
gaacctcccccctggctngtagaaaagctgcaaaccac

SEQ ID NO: 435 - DNA, 38 bp, Homo sapiens
  misc_feature (20)..(20): n is a, c, g, or t
cttgctactcctggttcagngccaccctaacacccatg

SEQ ID NO: 436 - DNA, 38 bp, Homo sapiens
  misc_feature (18)..(18): n is a, c, g, or t
aggagcttcagcaggagntccttcccagaaggttgatt

SEQ ID NO: 437 - DNA, 38 bp, Homo sapiens
  misc_feature (18)..(18): n is a, c, g, or t
cagcgttaggagccgttnccttcaggtgttaaggaagg

SEQ ID NO: 438 - DNA, 38 bp, Homo sapiens
  misc_feature (19)..(19): n is a, c, g, or t
tgaggacctgcagaagacncagtgacagccagagaatg

SEQ ID NO: 439 - DNA, 38 bp, Homo sapiens
  misc_feature (21)..(21): n is a, c, g, or t
tattaagggtcaagggtccangcaggcctctctcctgt

SEQ ID NO: 440 - DNA, 38 bp, Homo sapiens
  misc_feature (18)..(18): n is a, c, g, or t
cagacctgcgtggccccngactacatcctctgtgaccc

SEQ ID NO: 441 - DNA, 38 bp, Homo sapiens
  misc_feature (21)..(21): n is a, c, g, or t
caggcttttcagattggatcnccgtggcgtactatgga

SEQ ID NO: 442 - DNA, 38 bp, Homo sapiens
  misc_feature (18)..(18): n is a, c, g, or t
aagtgcccagtgcccctntggtggattcaagatgtctg

SEQ ID NO: 443 - DNA, 38 bp, Homo sapiens
  misc_feature (20)..(20): n is a, c, g, or t
gtggctgtaggaatctgtcncacagatgaccacgtggt

SEQ ID NO: 444 - DNA, 38 bp, Homo sapiens
  misc_feature (21)..(21): n is a, c, g, or t
ctggtgttcatgaagtggtgnactggtttgcccttgca

SEQ ID NO: 445 - DNA, 38 bp, Homo sapiens
  misc_feature (20)..(20): n is a, c, g, or t
actgggaacgactgtctatnaccctgggaactcgaagt

SEQ ID NO: 446 - DNA, 38 bp, Homo sapiens
  misc_feature (20)..(20): n is a, c, g, or t
tgggggaaacaaagatgccngagccgatcatgttcccc

SEQ ID NO: 447 - DNA, 38 bp, Homo sapiens
  misc_feature (20)..(20): n is a, c, g, or t
tggaacctcattgctaccanagacttgcactgaagccg

SEQ ID NO: 448 - DNA, 38 bp, Homo sapiens
  misc_feature (19)..(19): n is a, c, g, or t
gcaggtcaaccatgacccntgagtacatacccctcacg

SEQ ID NO: 449 - DNA, 38 bp, Homo sapiens
  misc_feature (21)..(21): n is a, c, g, or t
ggaaagaacattccaaggcanaagagtcccagcagcgg

SEQ ID NO: 450 - DNA, 38 bp, Homo sapiens
  misc_feature (21)..(21): n is a, c, g, or t
gtttctaatggctacctggtntccctcaccatgtgcct

SEQ ID NO: 451 - DNA, 38 bp, Homo sapiens
  misc_feature (21)..(21): n is a, c, g, or t
gaggatgccttcaacttcaanaattgggtgacgctgct

SEQ ID NO: 452 - DNA, 38 bp, Homo sapiens
  misc_feature (18)..(18): n is a, c, g, or t
gaaccaggcatcgtgctngaagaccacagtcaggtagc

SEQ ID NO: 453 - DNA, 38 bp, Homo sapiens
  misc_feature (18)..(18): n is a, c, g, or t
ctgggaacgctgctcccntggaattttttcatgacggc

SEQ ID NO: 454 - DNA, 38 bp, Homo sapiens
  misc_feature (20)..(20): n is a, c, g, or t
atcccacaattgggaagggntcatggagtgagtgtgca

SEQ ID NO: 455 - DNA, 38 bp, Homo sapiens
  misc_feature (20)..(20): n is a, c, g, or t
gaacatgcttgtgcttctgngcttctgagggctgttct

SEQ ID NO: 456 - DNA, 38 bp, Homo sapiens
  misc_feature (21)..(21): n is a, c, g, or t
gagatgctcagaacctcatanaagcagccagcactggg

SEQ ID NO: 457 - DNA, 38 bp, Homo sapiens
  misc_feature (18)..(18): n is a, c, g, or t
agggccgtgtcttggggncttggactgcagtttgtact

SEQ ID NO: 458 - DNA, 38 bp, Homo sapiens
  misc_feature (20)..(20): n is a, c, g, or t
cgaagaagggaatggacacngttaactgcagccaacgc

SEQ ID NO: 459 - DNA, 38 bp, Homo sapiens
  misc_feature (20)..(20): n is a, c, g, or t
agaggaaagactgtcttgcnagaaatggccagcttgtg

SEQ ID NO: 460 - DNA, 38 bp, Homo sapiens
  misc_feature (18)..(18): n is a, c, g, or t
tcactgctggtacagctntgttgttcatttttgcagct

SEQ ID NO: 461 - DNA, 38 bp, Homo sapiens
  misc_feature (18)..(18): n is a, c, g, or t
cagactggcttcagcttnctgcagattttctccatcag

SEQ ID NO: 462 - DNA, 38 bp, Homo sapiens
  misc_feature (13)..(13): n is a, c, g, or t
  misc_feature (18)..(18): n is a, c, g, or t
atgttttgcggcnatgtngtgttggagggatgaagatg

SEQ ID NO: 463 - DNA, 38 bp, Homo sapiens
  misc_feature (18)..(18): n is a, c, g, or t
ctccaacacgacatcgcngcaaaacatctctctcaggt

SEQ ID NO: 464 - DNA, 38 bp, Homo sapiens
  misc_feature (18)..(18): n is a, c, g, or t
aggcttgccagacctccntcagcctgaagactatgaag

SEQ ID NO: 465 - DNA, 38 bp, Homo sapiens
  misc_feature (20)..(20): n is a, c, g, or t
tgagctgtaccccacattcntcaggtgagtgcatggaa

SEQ ID NO: 466 - DNA, 38 bp, Homo sapiens
  misc_feature (19)..(19): n is a, c, g, or t
ttccagaagcaagccttcntcatcttatgcctgctgtc

SEQ ID NO: 467 - DNA, 39 bp, Homo sapiens
  misc_feature (21)..(22): n is a, c, g, or t
atagtcaaatgaagacggggnnggtgtcatctgaaggct

SEQ ID NO: 468 - DNA, 39 bp, Homo sapiens
  misc_feature (18)..(18): n is a, c, g, or t
  misc_feature (24)..(24): n is a, c, g, or t
caggcgaaggtggcactntgtatngtgatgcaatccttc

SEQ ID NO: 469 - DNA, 39 bp, Homo sapiens
  misc_feature (21)..(21): n is a, c, g, or t
  misc_feature (27)..(27): n is a, c, g, or t
cgtttcagcatcaccttctcnatcccngaaggtgctttg

SEQ ID NO: 470 - DNA, 39 bp, Homo sapiens
  misc_feature (21)..(21): n is a, c, g, or t
  misc_feature (24)..(24): n is a, c, g, or t
cggttactcgacaaacccatnacntttccagatggacgc

SEQ ID NO: 471 - DNA, 39 bp, Homo sapiens
  misc_feature (20)..(21): n is a, c, g, or t
gagacagcaagatgtccttnnaggacatcaaggccaacg

SEQ ID NO: 472 - DNA, 39 bp, Homo sapiens
  misc_feature (21)..(21): n is a, c, g, or t
  misc_feature (35)..(35): n is a, c, g, or t
atgaaggaagatcccacagtntcagccctgcttantagt

SEQ ID NO: 473 - DNA, 39 bp, Homo sapiens
  misc_feature (22)..(22): n is a, c, g, or t
  misc_feature (28)..(28): n is a, c, g, or t
gatgaagtccttcagatttggnaaggcntccaagcagtt

SEQ ID NO: 474 - DNA, 39 bp, Homo sapiens
  misc_feature (20)..(20): n is a, c, g, or t
  misc_feature (35)..(35): n is a, c, g, or t
ataccatggcagtgtatgcngtgaaggggtgtctngtac

SEQ ID NO: 475 - DNA, 39 bp, Homo sapiens
  misc_feature (22)..(22): n is a, c, g, or t
  misc_feature (38)..(38): n is a, c, g, or t
gaacagaaccaggattcattgngttcgagtggctgggng

SEQ ID NO: 476 - DNA, 39 bp, Homo sapiens
  misc_feature (22)..(22): n is a, c, g, or t
  misc_feature (33)..(33): n is a, c, g, or t
ttttttgtgataacagccaccnaggggactccngcacac

SEQ ID NO: 477 - DNA, 38 bp, Homo sapiens
  misc_feature (20)..(20): n is a, c, g, or t
ctcactgggttggtcaaagntagtcaccttggcctggt

SEQ ID NO: 478 - DNA, 39 bp, Homo sapiens
  misc_feature (18)..(18): n is a, c, g, or t
atctgctggaccccgcanatcctctgtctttacaggaac

SEQ ID NO: 479 - DNA, 39 bp, Homo sapiens
  misc_feature (22)..(22): n is a, c, g, or t
ccaaacagacatcaagaccatnacagtcaggcagaccag

SEQ ID NO: 480 - DNA, 39 bp, Homo sapiens
  misc_feature (22)..(22): n is a, c, g, or t
ggtatagataaggaggcacagnggcatcattccgagggc

SEQ ID NO: 481 - DNA, 39 bp, Homo sapiens
  misc_feature (22)..(22): n is a, c, g, or t
agaatggtggtgtcttcttcanttgatggagaagcgcag

SEQ ID NO: 482 - DNA, 39 bp, Homo sapiens
  misc_feature (21)..(21): n is a, c, g, or t
gccactgtactccaacctacntgacagagtgagaccctg

SEQ ID NO: 483 - DNA, 39 bp, Homo sapiens
  misc_feature (18)..(18): n is a, c, g, or t
aggcctcgcaggggcctnataatgcgttcaaaacacagt

SEQ ID NO: 484 - DNA, 39 bp, Homo sapiens
  misc_feature (18)..(18): n is a, c, g, or t
cagagaaggtctgggggnctgcatctattcaaaagaggc

SEQ ID NO: 485 - DNA, 39 bp, Homo sapiens
  misc_feature (22)..(22): n is a, c, g, or t
acagatggtacacctacatctntgcaggaagtggctccc

SEQ ID NO: 486 - DNA, 39 bp, Homo sapiens
  misc_feature (21)..(21): n is a, c, g, or t
tgacggtgagagaaaacttanagttctcagcagctcttc

SEQ ID NO: 487 - DNA, 39 bp, Homo sapiens
  misc_feature (18)..(18): n is a, c, g, or t
ccacttcccacactgccncagattccaaccagtttaccc

SEQ ID NO: 488 - DNA, 39 bp, Homo sapiens
  misc_feature (22)..(22): n is a, c, g, or t
tccttcgtatagcaagtttttngctcatcagcagagagc

SEQ ID NO: 489 - DNA, 39 bp, Homo sapiens
  misc_feature (19)..(19): n is a, c, g, or t
cccctggagagaagatganaagtgggaaaacactggact

SEQ ID NO: 490 - DNA, 39 bp, Homo sapiens
  misc_feature (5)..(5): n is a, c, g, or t
  misc_feature (22)..(22): n is a, c, g, or t
acaangggaagattatagagtncggcagccctgaagaac

SEQ ID NO: 491 - DNA, 39 bp, Homo sapiens
  misc_feature (18)..(18): n is a, c, g, or t
gctgcggtggatctaganacagacaacctcattcagacg

SEQ ID NO: 492 - DNA, 39 bp, Homo sapiens
  misc_feature (20)..(20): n is a, c, g, or t
cacaagcaactgctgaacantatccttcgagcacctatg

SEQ ID NO: 493 - DNA, 39 bp, Homo sapiens
  misc_feature (19)..(19): n is a, c, g, or t
ctgcatcttcggggatctnttccacactggatatcagcc

SEQ ID NO: 494 - DNA, 39 bp, Homo sapiens
  misc_feature (18)..(18): n is a, c, g, or t
atggtgatgtgcccgtgnacattttccatttctcccagc

SEQ ID NO: 495 - DNA, 39 bp, Homo sapiens
  misc_feature (19)..(19): n is a, c, g, or t
gccaggaaggagtacaccnttggagaaacagtgaacctg

SEQ ID NO: 496 - DNA, 39 bp, Homo sapiens
  misc_feature (22)..(22): n is a, c, g, or t
ctcgttgaaatgggaatagacnggggagcggctgaccga

SEQ ID NO: 497 - DNA, 39 bp, Homo sapiens
  misc_feature (19)..(19): n is a, c, g, or t
gtgcacatttgccgtctangtgaccattgacgagaacaa

SEQ ID NO: 498 - DNA, 39 bp, Homo sapiens
  misc_feature (22)..(22): n is a, c, g, or t
ttttctcaaccagggtttcacntttgggaaagctggcga

SEQ ID NO: 499 - DNA, 39 bp, Homo sapiens
  misc_feature (19)..(19): n is a, c, g, or t
ggcatgtcctagagccacngcaccaaatacaattgcaga

SEQ ID NO: 500 - DNA, 39 bp, Homo sapiens
  misc_feature (22)..(22): n is a, c, g, or t
ggtcaaaaacagaggattgctnttgcccgagccctcatc

SEQ ID NO: 501 - DNA, 39 bp, Homo sapiens
  misc_feature (20)..(20): n is a, c, g, or t
gccccaaatcaaacaggggnctagagaccatctcttcgc

SEQ ID NO: 502 - DNA, 39 bp, Homo sapiens
  misc_feature (18)..(18): n is a, c, g, or t
ctgcggtgatcagcagtnacattgcacatctttctgatg

SEQ ID NO: 503 - DNA, 39 bp, Homo sapiens
  misc_feature (20)..(20): n is a, c, g, or t
cggtttctcttcaggtcggnatggatcttgaaggggacc

SEQ ID NO: 504 - DNA, 39 bp, Homo sapiens
  misc_feature (20)..(20): n is a, c, g, or t
tcgtaatgctgacgtcatcnctggtttcgatgatggagt

SEQ ID NO: 505 - DNA, 39 bp, Homo sapiens
  misc_feature (22)..(22): n is a, c, g, or t
cagacaaggacatagtcttctncaagaccctgaagccct

SEQ ID NO: 506 - DNA, 39 bp, Homo sapiens
  misc_feature (18)..(18): n is a, c, g, or t
gctcctggcctcagaggntagtgcctgtttggatatgtt

SEQ ID NO: 507 - DNA, 39 bp, Homo sapiens
  misc_feature (20)..(20): n is a, c, g, or t
cccaaaaccagttccgtctngggggttgtgggaaacacc

SEQ ID NO: 508 - DNA, 39 bp, Homo sapiens
  misc_feature (22)..(22): n is a, c, g, or t
cattttatgccaccctgacatnatccggcctatcaccag

SEQ ID NO: 509 - DNA, 39 bp, Homo sapiens
  misc_feature (21)..(21): n is a, c, g, or t
ctccttgatgttctcttggtngaaacggaaggggtcgta

SEQ ID NO: 510 - DNA, 39 bp, Homo sapiens
  misc_feature (18)..(18): n is a, c, g, or t
tgtgctgagtcgctcagngtccaacattatctgttccgt

SEQ ID NO: 511 - DNA, 39 bp, Homo sapiens
  misc_feature (21)..(21): n is a, c, g, or t
catcgactcctttctcatccncatgcaggaggtacaccc

SEQ ID NO: 512 - DNA, 39 bp, Homo sapiens
  misc_feature (20)..(20): n is a, c, g, or t
ccagaccatctgtgcttctncagacaggaatgaagcaca

SEQ ID NO: 513 - DNA, 39 bp, Homo sapiens
  misc_feature (21)..(21): n is a, c, g, or t
ttcattccatttggaggaggncttaggagctgtgtaggc

SEQ ID NO: 514 - DNA, 39 bp, Homo sapiens
  misc_feature (19)..(19): n is a, c, g, or t
gatcccagcactcagtccncttccctgagttggatatga

SEQ ID NO: 515 - DNA, 39 bp, Homo sapiens
  misc_feature (22)..(22): n is a, c, g, or t
gttttcagcaatggaaagaganggaaggagatccggcgt

SEQ ID NO: 516 - DNA, 39 bp, Homo sapiens
  misc_feature (19)..(19): n is a, c, g, or t
agaaggctggtcagtaccnactctggagcatttctcatc

SEQ ID NO: 517 - DNA, 39 bp, Homo sapiens
  misc_feature (20)..(20): n is a, c, g, or t
caccaagctaggtgctattngtcatctgctcctgttcac

SEQ ID NO: 518 - DNA, 39 bp, Homo sapiens
  misc_feature (22)..(22): n is a, c, g, or t
ctcttccccatcccaaaattcngcagcgtcatgagggag

SEQ ID NO: 519 - DNA, 39 bp, Homo sapiens
  misc_feature (21)..(21): n is a, c, g, or t
ctttacctgaaaatgggcccnagttcctggaaggtctgg

SEQ ID NO: 520 - DNA, 39 bp, Homo sapiens
  misc_feature (19)..(19): n is a, c, g, or t
caagaggagaaggcttcantggatccttttgtggtcctt

SEQ ID NO: 521 - DNA, 39 bp, Homo sapiens
  misc_feature (20)..(20): n is a, c, g, or t
ggattgtaagcaccccctgnatccaggtaaggccaagtt

SEQ ID NO: 522 - DNA, 39 bp, Homo sapiens
  misc_feature (20)..(20): n is a, c, g, or t
ctaccagctgtgcttcattnctgtctgaagaagagcaga

SEQ ID NO: 523 - DNA, 39 bp, Homo sapiens
  misc_feature (22)..(22): n is a, c, g, or t
ggaaagaagagcttagaggaangcattcaggaggaggcc

SEQ ID NO: 524 - DNA, 39 bp, Homo sapiens
  misc_feature (20)..(20): n is a, c, g, or t
caagtgggaagagaaagctngggagggtaagtcctttga

SEQ ID NO: 525 - DNA, 39 bp, Homo sapiens
  misc_feature (19)..(19): n is a, c, g, or t
acctgtcacctacgatgcnctggtacagatggagtacct

SEQ ID NO: 526 - DNA, 39 bp, Homo sapiens
  misc_feature (21)..(21): n is a, c, g, or t
tcatgacccaaagtactgganagagcctgagaagttcct

SEQ ID NO: 527 - DNA, 39 bp, Homo sapiens
  misc_feature (20)..(20): n is a, c, g, or t
gaagaggagcattgaggacngtgttcaagaggaagcccg

SEQ ID NO: 528 - DNA, 39 bp, Homo sapiens
  misc_feature (22)..(22): n is a, c, g, or t
cagcagagtgatgattttttcngtgggcaaaaggcggtg

SEQ ID NO: 529 - DNA, 39 bp, Homo sapiens
  misc_feature (21)..(21): n is a, c, g, or t
cttcctttatgaagccatgcncttctccagctttgtgcc

SEQ ID NO: 530 - DNA, 39 bp, Homo sapiens
  misc_feature (19)..(19): n is a, c, g, or t
cctaggaagaagcagcagntcaaggacacagactgaagt

SEQ ID NO: 531 - DNA, 39 bp, Homo sapiens
  misc_feature (19)..(19): n is a, c, g, or t
ctctccacaaaggggtctngtggattgttgagagagtcg

SEQ ID NO: 532 - DNA, 39 bp, Homo sapiens
  misc_feature (19)..(19): n is a, c, g, or t
ggagtccctatggtggganttcccatgtttgctgatcag

SEQ ID NO: 533 - DNA, 39 bp, Homo sapiens
  misc_feature (19)..(19): n is a, c, g, or t
ccagaaactgcattggcangaggtttgctctcatgaaca

SEQ ID NO: 534 - DNA, 39 bp, Homo sapiens
  misc_feature (18)..(18): n is a, c, g, or t
tggcctgcctccttcgcncatttcagagaatttctgcag

SEQ ID NO: 535 - DNA, 39 bp, Homo sapiens
  misc_feature (19)..(19): n is a, c, g, or t
gctttgccacgatcccacnaaactacaccatgagcttcc

SEQ ID NO: 536 - DNA, 39 bp, Homo sapiens
  misc_feature (18)..(18): n is a, c, g, or t
tggactggcctccttccnctatatgtgtgtctactgctg

SEQ ID NO: 537 - DNA, 39 bp, Homo sapiens
  misc_feature (20)..(20): n is a, c, g, or t
gaggagcattagttgccatnaatccaggtgatcgcaaat

SEQ ID NO: 538 - DNA, 39 bp, Homo sapiens
  misc_feature (19)..(19): n is a, c, g, or t
agttcaacatcagcgtggncaacaaagtgagaccctgtc

SEQ ID NO: 539 - DNA, 39 bp, Homo sapiens
  misc_feature (18)..(18): n is a, c, g, or t
aggagcgagccacacccnaatggtagaaagatctcaggg

SEQ ID NO: 540 - DNA, 39 bp, Homo sapiens
  misc_feature (21)..(21): n is a, c, g, or t
tctcgcaaagttattcttccnccatggccaacaacgaag

SEQ ID NO: 541 - DNA, 39 bp, Homo sapiens
  misc_feature (21)..(21): n is a, c, g, or t
gatggcaggaactacattgtngatgctgggtttggacgc

SEQ ID NO: 542 - DNA, 39 bp, Homo sapiens
  misc_feature (22)..(22): n is a, c, g, or t
ctttttggagagacatttgccntccgtgccaggcctgct

SEQ ID NO: 543 - DNA, 39 bp, Homo sapiens
  misc_feature (19)..(19): n is a, c, g, or t
gacctccgctgcaaatacntctccctcatctacaccaac

SEQ ID NO: 544 - DNA, 39 bp, Homo sapiens
  misc_feature (21)..(21): n is a, c, g, or t
gcttagagaaacctccagganactgctaccatggcagag

SEQ ID NO: 545 - DNA, 39 bp, Homo sapiens
  misc_feature (19)..(19): n is a, c, g, or t
ttggtacagaccagagccnttctcaactacattgccagc

SEQ ID NO: 546 - DNA, 39 bp, Homo sapiens
  misc_feature (20)..(20): n is a, c, g, or t
tgtgtttgaggatgggaccntgtttgaggctatcgactc

SEQ ID NO: 547 - DNA, 39 bp, Homo sapiens
  misc_feature (22)..(22): n is a, c, g, or t
gaggaaagagcctgtatttaangatgagctcccagcaag

SEQ ID NO: 548 - DNA, 39 bp, Homo sapiens
  misc_feature (18)..(18): n is a, c, g, or t
caggctctttcctcaggnctctgtatggaaaacagagac

SEQ ID NO: 549 - DNA, 39 bp, Homo sapiens
  misc_feature (18)..(18): n is a, c, g, or t
tccgcaatgtactgccangaacagctgtaaaatggatga

SEQ ID NO: 550 - DNA, 39 bp, Homo sapiens
  misc_feature (20)..(20): n is a, c, g, or t
acttacaccagaggatcganaagttccgtttcaccccac

SEQ ID NO: 551 - DNA, 39 bp, Homo sapiens
  misc_feature (18)..(18): n is a, c, g, or t
cgttgtggagctcgccgngtgttcatcgtcttcagaaaa

SEQ ID NO: 552 - DNA, 39 bp, Homo sapiens
  misc_feature (18)..(18): n is a, c, g, or t
ttttctgggggaggcagngaaggatttctgatctgtggg

SEQ ID NO: 553 - DNA, 39 bp, Homo sapiens
  misc_feature (21)..(21): n is a, c, g, or t
cacaaactcatgcaactctgngttccacttcggccaaga

SEQ ID NO: 554 - DNA, 39 bp, Homo sapiens
  misc_feature (18)..(18): n is a, c, g, or t
ttgctgggctaccgccangtcagatctgaacaagaacag

SEQ ID NO: 555 - DNA, 39 bp, Homo sapiens
  misc_feature (21)..(21): n is a, c, g, or t
ccattcccaaagtcagaaagngaagccagatctcaaggg

SEQ ID NO: 556 - DNA, 39 bp, Homo sapiens
  misc_feature (20)..(20): n is a, c, g, or t
cagatgtgcatagaagccantctctgtcacatacaccgc

SEQ ID NO: 557 - DNA, 39 bp, Homo sapiens
  misc_feature (22)..(22): n is a, c, g, or t
aaattgtccaggaaaccagaancagagctgggcagccct

SEQ ID NO: 558 - DNA, 39 bp, Homo sapiens
  misc_feature (18)..(18): n is a, c, g, or t
aacgcaggatgtgctggntgttttgtttcgggcttttat

SEQ ID NO: 559 - DNA, 39 bp, Homo sapiens
  misc_feature (19)..(19): n is a, c, g, or t
gcctcatctggggtagggncaagaggaaagtacagagtg

SEQ ID NO: 560 - DNA, 39 bp, Homo sapiens
  misc_feature (19)..(19): n is a, c, g, or t
ctccagaggctgaaagacnatcagcatcttggtaactgc

SEQ ID NO: 561 - DNA, 39 bp, Homo sapiens
  misc_feature (20)..(20): n is a, c, g, or t
gctttttgagggccaagacnattgggtttgttcaacgct

SEQ ID NO: 562 - DNA, 39 bp, Homo sapiens
  misc_feature (18)..(18): n is a, c, g, or t
accctggaggacgatgcnccatacatcttaaaagaggct

SEQ ID NO: 563 - DNA, 39 bp, Homo sapiens
  misc_feature (18)..(18): n is a, c, g, or t
tggtgtggtgtccagggntccatctttccagaatccatg

SEQ ID NO: 564 - DNA, 39 bp, Homo sapiens
  misc_feature (20)..(20): n is a, c, g, or t
tcaaagacactccccttctnaggtagaaaaagcctcccc

SEQ ID NO: 565 - DNA, 39 bp, Homo sapiens
  misc_feature (22)..(22): n is a, c, g, or t
ccacactcacagttttcacttnagtgtatgcctgcagcc

SEQ ID NO: 566 - DNA, 39 bp, Homo sapiens
  misc_feature (20)..(20): n is a, c, g, or t
gcaggccctatcttccaaangagcataaccaacgggaaa

SEQ ID NO: 567 - DNA, 39 bp, Homo sapiens
  misc_feature (13)..(13): n is a, c, g, or t
  misc_feature (20)..(20): n is a, c, g, or t
ggttagtggcaanctggtgnccccccttcctgtgatttt

SEQ ID NO: 568 - DNA, 39 bp, Homo sapiens
  misc_feature (21)..(21): n is a, c, g, or t
acctactcgtttttcaagcantagttgctctccgggttt

SEQ ID NO: 569 - DNA, 39 bp, Homo sapiens
  misc_feature (21)..(21): n is a, c, g, or t
acttggaacctcattgctacnacagacttgcactgaagc

SEQ ID NO: 570 - DNA, 39 bp, Homo sapiens
  misc_feature (22)..(22): n is a, c, g, or t
gggctgaattcataaaagacancagggccaggaaggcaa

SEQ ID NO: 571 - DNA, 39 bp, Homo sapiens
  misc_feature (21)..(21): n is a, c, g, or t
ggttggccttatactgtggtnggctttagacacagccca

SEQ ID NO: 572 - DNA, 39 bp, Homo sapiens
  misc_feature (18)..(18): n is a, c, g, or t
tgcaaaacacacgccagnttgttcaagaagatcctgttg

SEQ ID NO: 573 - DNA, 39 bp, Homo sapiens
  misc_feature (21)..(21): n is a, c, g, or t
gtggatttgccaatttcagcnccattgggatcatgctgg

SEQ ID NO: 574 - DNA, 39 bp, Homo sapiens
  misc_feature (20)..(20): n is a, c, g, or t
aacctccggtcatgacaacntggacttcagagagtgtca

SEQ ID NO: 575 - DNA, 39 bp, Homo sapiens
  misc_feature (18)..(18): n is a, c, g, or t
gccgtgtggctagaactncctctgatcatctttggtaag

SEQ ID NO: 576 - DNA, 39 bp, Homo sapiens
  misc_feature (18)..(18): n is a, c, g, or t
gtccaaggcgctcaatgnttagtaagatcaagagagctc

SEQ ID NO: 577 - DNA, 39 bp, Homo sapiens
  misc_feature (22)..(22): n is a, c, g, or t
ttaccttaaggtccaaacctcngaaccctcgggcacctg

SEQ ID NO: 578 - DNA, 39 bp, Homo sapiens
  misc_feature (19)..(19): n is a, c, g, or t
tctcaccctgtctagcagnttgcaaatcttcaagtggca

SEQ ID NO: 579 - DNA, 40 bp, Homo sapiens
  misc_feature (21)..(22): n is a, c, g, or t
ttcacctgaggaagtgtatgnngtggcaaaattagctgga

SEQ ID NO: 580 - DNA, 40 bp, Homo sapiens
  misc_feature (21)..(22): n is a, c, g, or t
agtccagctaattttgccacnncatacacttcctcaggtg

SEQ ID NO: 581 - DNA, 40 bp, Homo sapiens
  misc_feature (23)..(23): n is a, c, g, or t
aacttactggatatttctcagcngcccagtctagccagtg

SEQ ID NO: 582 - DNA, 40 bp, Homo sapiens
  misc_feature (19)..(19): n is a, c, g, or t
gtggctatggaccagtggngggtgtatttcaatcctgtgc

SEQ ID NO: 583 - DNA, 40 bp, Homo sapiens
  misc_feature (19)..(19): n is a, c, g, or t
acatggctctgcaaatccngcagtattttcttctcacctg

SEQ ID NO: 584 - DNA, 40 bp, Homo sapiens
  misc_feature (22)..(22): n is a, c, g, or t
gagtgggaaagtttatgcaaanatcagcagctacaatgcc

SEQ ID NO: 585 - DNA, 40 bp, Homo sapiens
  misc_feature (20)..(20): n is a, c, g, or t
gagcatcttcttcatcgtgntcaatgagttttgcgaaaga

SEQ ID NO: 586 - DNA, 40 bp, Homo sapiens
  misc_feature (22)..(22): n is a, c, g, or t
ccactcagatgacttacttcancggatcaaccaaccacgg

SEQ ID NO: 587 - DNA, 40 bp, Homo sapiens
  misc_feature (21)..(21): n is a, c, g, or t
ctacatccccaagaaatgctntgtcttcgtaaaccagtgg

SEQ ID NO: 588 - DNA, 40 bp, Homo sapiens
  misc_feature (20)..(20): n is a, c, g, or t
ccctggtgactttctttgcncctctccactcttacagtca

SEQ ID NO: 589 - DNA, 40 bp, Homo sapiens
  misc_feature (13)..(13): n is a, c, g, or t
  misc_feature (19)..(19): n is a, c, g, or t
actgcattggcangaggtntgctctcatgaacatgaaact

SEQ ID NO: 590 - DNA, 40 bp, Homo sapiens
  misc_feature (20)..(20): n is a, c, g, or t
gagaggaagggaaacagagnccatgggagaacagacattt

SEQ ID NO: 591 - DNA, 40 bp, Homo sapiens
  misc_feature (23)..(23): n is a, c, g, or t
tgagattcaacacagtgttcaangcggagactggaacctg

SEQ ID NO: 592 - DNA, 40 bp, Homo sapiens
  misc_feature (21)..(21): n is a, c, g, or t
cactgatccttccatcttgtncttggatgagcctacaact

SEQ ID NO: 593 - DNA, 40 bp, Homo sapiens
  misc_feature (20)..(20): n is a, c, g, or t
aggctaaccctctgttgacngtaagccttttggtttgggc

SEQ ID NO: 594 - DNA, 40 bp, Homo sapiens
  misc_feature (4)..(4): n is a, c, g, or t
  misc_feature (22)..(22): n is a, c, g, or t
aaangaagccaaattcatcccnctgaggcaggaacttctc

SEQ ID NO: 595 - DNA, 40 bp, Homo sapiens
  misc_feature (21)..(21): n is a, c, g, or t
gacaaaggagtagtagctgantttgattctccagccaacc

SEQ ID NO: 596 - DNA, 40 bp, Homo sapiens
  misc_feature (21)..(21): n is a, c, g, or t
agagggatcacttgtgacatnggtagcatggagaaggtag

SEQ ID NO: 597 - DNA, 40 bp, Homo sapiens
  misc_feature (18)..(18): n is a, c, g, or t
attggcccagcaaaggcnagatccagtttaacaactacca

SEQ ID NO: 598 - DNA, 40 bp, Homo sapiens
  misc_feature (21)..(21): n is a, c, g, or t
caggtgaagttctccatctanctggagtacctacaagcaa

SEQ ID NO: 599 - DNA, 40 bp, Homo sapiens
  misc_feature (21)..(21): n is a, c, g, or t
caaactctccttttttggccnggagagcactgtaggatcc

SEQ ID NO: 600 - DNA, 40 bp, Homo sapiens
  misc_feature (21)..(21): n is a, c, g, or t
cagcttctccacgtgtataantccaggaccaagagatcct

SEQ ID NO: 601 - DNA, 40 bp, Homo sapiens
  misc_feature (23)..(23): n is a, c, g, or t
cctggagaaaatcattttctccncttggcagtgtcccagg

SEQ ID NO: 602 - DNA, 40 bp, Homo sapiens
  misc_feature (23)..(23): n is a, c, g, or t
acagttgaaacatcaaactcacnggcattaggccttccgt

SEQ ID NO: 603 - DNA, 40 bp, Homo sapiens
  misc_feature (20)..(20): n is a, c, g, or t
cctcatttatgtcagctgcnattgcaccaaaggacaagtt

SEQ ID NO: 604 - DNA, 40 bp, Homo sapiens
  misc_feature (1)..(1): n is a, c, g, or t
  misc_feature (19)..(19): n is a, c, g, or t
ngcctctcccttctctctntgagggatattttctctgact

SEQ ID NO: 605 - DNA, 40 bp, Homo sapiens
  misc_feature (21)..(21): n is a, c, g, or t
tctctcatgtttgcttctccnttcaatctggagacagagc

SEQ ID NO: 606 - DNA, 40 bp, Homo sapiens
  misc_feature (21)..(21): n is a, c, g, or t
gtgaccatcatcctcccaaangtgctcatcatctgagaga

SEQ ID NO: 607 - DNA, 40 bp, Homo sapiens
  misc_feature (19)..(19): n is a, c, g, or t
ctacagggttcactgctgntttacacttcacctgtgtcag

SEQ ID NO: 608 - DNA, 40 bp, Homo sapiens
  misc_feature (20)..(20): n is a, c, g, or t
tggcctttttctcttggtgnggaattatgagggcacatcc

SEQ ID NO: 609 - DNA, 40 bp, Homo sapiens
  misc_feature (20)..(20): n is a, c, g, or t
gcaactactacaaccgggtntatggagaattcatgcgagt

SEQ ID NO: 610 - DNA, 40 bp, Homo sapiens
  misc_feature (21)..(21): n is a, c, g, or t
gatttgctcttactacagctncagtgattgggggaggaaa

SEQ ID NO: 611 - DNA, 40 bp, Homo sapiens
  misc_feature (22)..(22): n is a, c, g, or t
gaagttgttatgcatatggccntgtctggggaggaatggc

SEQ ID NO: 612 - DNA, 40 bp, Homo sapiens
  misc_feature (19)..(19): n is a, c, g, or t
gacagctcacagagacctnttttataaggacgccagttcc

SEQ ID NO: 613 - DNA, 40 bp, Homo sapiens
  misc_feature (18)..(18): n is a, c, g, or t
agtcggtagccgacagcnttctgtttttacgtgacaaaag

SEQ ID NO: 614 - DNA, 40 bp, Homo sapiens
  misc_feature (22)..(22): n is a, c, g, or t
agagaaaccaggagataccacnggtggtggtgtcatggcc

SEQ ID NO: 615 - DNA, 40 bp, Homo sapiens
  misc_feature (21)..(21): n is a, c, g, or t
agcaaagaaggttcactctgncagcactaaggaactttgg

SEQ ID NO: 616 - DNA, 40 bp, Homo sapiens
  misc_feature (21)..(21): n is a, c, g, or t
cccaataaggtgagtggatgntacatggagaaggagggag

SEQ ID NO: 617 - DNA, 40 bp, Homo sapiens
  misc_feature (18)..(18): n is a, c, g, or t
gggatccaggctgggcanacaatcataggaaacagcatat

SEQ ID NO: 618 - DNA, 40 bp, Homo sapiens
  misc_feature (21)..(21): n is a, c, g, or t
gggtcgatggtcagtaacacntcagaagaaagggccaatg

SEQ ID NO: 619 - DNA, 40 bp, Homo sapiens
  misc_feature (18)..(18): n is a, c, g, or t
ggtgagctgctggctgcnctacttaacataccgtttgtgt

SEQ ID NO: 620 - DNA, 40 bp, Homo sapiens
  misc_feature (21)..(21): n is a, c, g, or t
gcaggggttttcttcttagcnctttggggcatggttgtag

SEQ ID NO: 621 - DNA, 40 bp, Homo sapiens
  misc_feature (18)..(18): n is a, c, g, or t
accgtgcctggccaaccntggtaacttttaacaaggaagg

SEQ ID NO: 622 - DNA, 40 bp, Homo sapiens
  misc_feature (23)..(23): n is a, c, g, or t
caaaaattagtcaggcatgatgncaggcgcctgtcatccc

SEQ ID NO: 623 - DNA, 40 bp, Homo sapiens
  misc_feature (21)..(21): n is a, c, g, or t
ccatctctgactggttgtacntgaagcagatgaatgcaag

SEQ ID NO: 624 - DNA, 40 bp, Homo sapiens
  misc_feature (21)..(21): n is a, c, g, or t
ttgctttgagagaactgaagntattggaggagtgtggagg

SEQ ID NO: 625 - DNA, 40 bp, Homo sapiens
  misc_feature (21)..(21): n is a, c, g, or t
agaaacttctgccatctttgnggatggaacagtggaggag

SEQ ID NO: 626 - DNA, 40 bp, Homo sapiens
  misc_feature (22)..(22): n is a, c, g, or t
aatacaagcatccagatggatntgagggaaaacgcatcct

SEQ ID NO: 627 - DNA, 40 bp, Homo sapiens
  misc_feature (19)..(19): n is a, c, g, or t
tgccatcttcacccagaancaaagaatactgaagccactc

SEQ ID NO: 628 - DNA, 40 bp, Homo sapiens
  misc_feature (18)..(18): n is a, c, g, or t
gtggagctgctgtacccngtcaaggagaaggtattctaca

SEQ ID NO: 629 - DNA, 40 bp, Homo sapiens
  misc_feature (21)..(21): n is a, c, g, or t
gctgtactctgtgtctcagtntttgccctattgtcgactg

SEQ ID NO: 630 - DNA, 40 bp, Homo sapiens
  misc_feature (20)..(20): n is a, c, g, or t
cccgtaggtattcaaagcantgagtatcccacagatcaga

SEQ ID NO: 631 - DNA, 40 bp, Homo sapiens
  misc_feature (3)..(3): n is a, c, g, or t
  misc_feature (18)..(18): n is a, c, g, or t
gcngtgaaggggtgtctngtaccatgcagacatgaaatag

SEQ ID NO: 632 - DNA, 40 bp, Homo sapiens
  misc_feature (19)..(19): n is a, c, g, or t
ccctgctaatgtggacagnagactttatccctccttctta

SEQ ID NO: 633 - DNA, 40 bp, Homo sapiens
  misc_feature (21)..(21): n is a, c, g, or t
ttcattggaaactacctgcanctgaacacagagcagatgt

SEQ ID NO: 634 - DNA, 40 bp, Homo sapiens
  misc_feature (19)..(19): n is a, c, g, or t
tgggactttggtgagctgngcggtcatggttttgaaataa

SEQ ID NO: 635 - DNA, 40 bp, Homo sapiens
  misc_feature (21)..(21): n is a, c, g, or t
cacatcattcactgggtgacntatgtagagctctgtgctc

SEQ ID NO: 636 - DNA, 40 bp, Homo sapiens
  misc_feature (20)..(20): n is a, c, g, or t
gctagaccttcagtttgggnaccacatcattcactgggtg

SEQ ID NO: 637 - DNA, 40 bp, Homo sapiens
  misc_feature (21)..(21): n is a, c, g, or t
ccaggagcattttcttccatngaggagatccccgaaaacg

SEQ ID NO: 638 - DNA, 40 bp, Homo sapiens
  misc_feature (21)..(21): n is a, c, g, or t
ctatccagtgacaagaggaancaagaacctcagttcaggg

SEQ ID NO: 639 - DNA, 40 bp, Homo sapiens
  misc_feature (23)..(23): n is a, c, g, or t
gacatctatgatgagtttgtggngcggagcgttgcccggg

SEQ ID NO: 640 - DNA, 40 bp, Homo sapiens
  misc_feature (22)..(22): n is a, c, g, or t
cttgtagatcattgctacctcnctgtgccatactgatgcc

SEQ ID NO: 641 - DNA, 40 bp, Homo sapiens
  misc_feature (19)..(19): n is a, c, g, or t
gcagggtatgggtcaccantgcatccagattgaatttctt

SEQ ID NO: 642 - DNA, 40 bp, Homo sapiens
  misc_feature (19)..(19): n is a, c, g, or t
gtcagctggtgcatctagnatcattgggattgacctcaac

SEQ ID NO: 643 - DNA, 40 bp, Homo sapiens
  misc_feature (21)..(21): n is a, c, g, or t
gaaatgtatgcacctagcacncttccagcaatggtagaga

SEQ ID NO: 644 - DNA, 40 bp, Homo sapiens
  misc_feature (20)..(20): n is a, c, g, or t
agtttaggagggaggaaggngtgaaactgacctatgggtg

SEQ ID NO: 645 - DNA, 40 bp, Homo sapiens
  misc_feature (19)..(19): n is a, c, g, or t
ttcagcttcctgcagatcntctcgaagaattttgagatgt

SEQ ID NO: 646 - DNA, 40 bp, Homo sapiens
  misc_feature (21)..(21): n is a, c, g, or t
gacctaagttccaagaagcancagtcccacaacattctgg

SEQ ID NO: 647 - DNA, 40 bp, Homo sapiens
  misc_feature (19)..(19): n is a, c, g, or t
tgagaccatcgaggaagcngaaaatatgcaaaggtaggca

SEQ ID NO: 648 - DNA, 40 bp, Homo sapiens
  misc_feature (21)..(21): n is a, c, g, or t
ggtggttgcagttcacagttnctctgcccaacttcttctt

SEQ ID NO: 649 - DNA, 40 bp, Homo sapiens
  misc_feature (23)..(23): n is a, c, g, or t
cggaattatatatcctacaagcnccttgtgctccacagct

SEQ ID NO: 650 - DNA, 40 bp, Homo sapiens
  misc_feature (22)..(22): n is a, c, g, or t
ccagaacagaaattactcagcncacttgggtgaatgccca

SEQ ID NO: 651 - DNA, 41 bp, Homo sapiens
  misc_feature (21)..(21): n is a, c, g, or t
  misc_feature (38)..(38): n is a, c, g, or t
agggtaatggtcctagacaangggaagattatagagtncgg

SEQ ID NO: 652 - DNA, 41 bp, Homo sapiens
  misc_feature (23)..(24): n is a, c, g, or t
ccaaatcatacatggacttctcnngcagcaggttgtacttc

SEQ ID NO: 653 - DNA, 41 bp, Homo sapiens
  misc_feature (19)..(20): n is a, c, g, or t
agaagtacaacctgctgcnngagaagtccatgtatgatttg

SEQ ID NO: 654 - DNA, 41 bp, Homo sapiens
  misc_feature (21)..(21): n is a, c, g, or t
  misc_feature (28)..(28): n is a, c, g, or t
catcttgttcctcaggttgantaaaggncagaagaaggatc

SEQ ID NO: 655 - DNA, 41 bp, Homo sapiens
  misc_feature (20)..(21): n is a, c, g, or t
caacagcaatatctgagccnnagtttcccattccaatcacc

SEQ ID NO: 656 - DNA, 41 bp, Homo sapiens
  misc_feature (20)..(20): n is a, c, g, or t
gtcttaaccagaagccaganaaaggggaaaatggaatcagg

SEQ ID NO: 657 - DNA, 41 bp, Homo sapiens
  misc_feature (21)..(21): n is a, c, g, or t
gaagagctaagttgagttccngttcccataatgcttgggtg

SEQ ID NO: 658 - DNA, 41 bp, Homo sapiens
  misc_feature (20)..(20): n is a, c, g, or t
ggccacattgaggatggtgnaacagagttggacattttggc

SEQ ID NO: 659 - DNA, 41 bp, Homo sapiens
  misc_feature (22)..(22): n is a, c, g, or t
ctgggagattctcctattgacncagaaagcgattccttcac

SEQ ID NO: 660 - DNA, 41 bp, Homo sapiens
  misc_feature (19)..(19): n is a, c, g, or t
ctgtgggaccccaactctnagatattttaccgacactcaaa

SEQ ID NO: 661 - DNA, 41 bp, Homo sapiens
  misc_feature (24)..(24): n is a, c, g, or t
tgtgaatctaacaacagacaaaantctctgcctcctggggc

SEQ ID NO: 662 - DNA, 41 bp, Homo sapiens
  misc_feature (23)..(23): n is a, c, g, or t
gcaccccatttttttttcattgnagtcctgtcttccagcca

SEQ ID NO: 663 - DNA, 41 bp, Homo sapiens
  misc_feature (21)..(21): n is a, c, g, or t
agcgaagacttttggttgatnttccaaaaggctcagtaagc

SEQ ID NO: 664 - DNA, 41 bp, Homo sapiens
  misc_feature (21)..(21): n is a, c, g, or t
gatctggttttgtcaagcccnagtaatgtaacactgcccca

SEQ ID NO: 665 - DNA, 41 bp, Homo sapiens
  misc_feature (19)..(19): n is a, c, g, or t
tatccgtggtgtgtctggnggagaaagaaaaaggactagta

SEQ ID NO: 666 - DNA, 41 bp, Homo sapiens
  misc_feature (18)..(18): n is a, c, g, or t
ccgttccgaaggcatttnccactagtttttggactatgtaa

SEQ ID NO: 667 - DNA, 41 bp, Homo sapiens
  misc_feature (20)..(20): n is a, c, g, or t
gaggttacgagtagccatgngccatatgatttatcggaagg

SEQ ID NO: 668 - DNA, 41 bp, Homo sapiens
  misc_feature (19)..(19): n is a, c, g, or t
gtggctgttgagcgaatanctgagtacacaaaagtggaaaa

SEQ ID NO: 669 - DNA, 41 bp, Homo sapiens
  misc_feature (22)..(22): n is a, c, g, or t
ccttatctttaggcattgaccntatccaacttggccaggaa

SEQ ID NO: 670 - DNA, 41 bp, Homo sapiens
  misc_feature (21)..(21): n is a, c, g, or t
cctactgaagctagtgaatgncatcttcacgtttgtgagtc

SEQ ID NO: 671 - DNA, 41 bp, Homo sapiens
  misc_feature (20)..(20): n is a, c, g, or t
gctctaacgagacaccttanagaacaggctttaaaagatgc

SEQ ID NO: 672 - DNA, 41 bp, Homo sapiens
  misc_feature (23)..(23): n is a, c, g, or t
caaaacttgaacttcttgggaanagaagtgttgggctgaga

SEQ ID NO: 673 - DNA, 41 bp, Homo sapiens
  misc_feature (22)..(22): n is a, c, g, or t
ccagcatctctacttataccangctctgctttaaggttctc

SEQ ID NO: 674 - DNA, 41 bp, Homo sapiens
  misc_feature (19)..(19): n is a, c, g, or t
tggccatgatggtacccancgacataaacaatttatcctgc

SEQ ID NO: 675 - DNA, 41 bp, Homo sapiens
  misc_feature (18)..(18): n is a, c, g, or t
  misc_feature (41)..(41): n is a, c, g, or t
acggatcaggtctccccntcatgatgatagtatttggagan

SEQ ID NO: 676 - DNA, 41 bp, Homo sapiens
  misc_feature (22)..(22): n is a, c, g, or t
ctgtttcttttctgtccagatnctctcggcatttagtgaca

SEQ ID NO: 677 - DNA, 41 bp, Homo sapiens
  misc_feature (23)..(23): n is a, c, g, or t
cattgctttaaaagccattgacngcagtcttctggtgagga

SEQ ID NO: 678 - DNA, 41 bp, Homo sapiens
  misc_feature (20)..(20): n is a, c, g, or t
ctgatctcacagtacagggnttgacattttctgcaaagagc

SEQ ID NO: 679 - DNA, 41 bp, Homo sapiens
  misc_feature (18)..(18): n is a, c, g, or t
tgtccttgccctttgccnttctagaggtgcaaaaaataaaa

SEQ ID NO: 680 - DNA, 41 bp, Homo sapiens
  misc_feature (7)..(7): n is a, c, g, or t
  misc_feature (21)..(21): n is a, c, g, or t
cattttntgtgccacaggatntgagttggtttgatgaccct

SEQ ID NO: 681 - DNA, 41 bp, Homo sapiens
  misc_feature (22)..(22): n is a, c, g, or t
taccggaaatctgaaaaggtanttggtgcaaaggtaggtga

SEQ ID NO: 682 - DNA, 41 bp, Homo sapiens
  misc_feature (20)..(20): n is a, c, g, or t
cccagagatgtttgaccctngtcactttctggatgaaggtg

SEQ ID NO: 683 - DNA, 41 bp, Homo sapiens
  misc_feature (21)..(21): n is a, c, g, or t
ctgtacctggttggtccttcntctttgcatgtaagctcttt

SEQ ID NO: 684 - DNA, 41 bp, Homo sapiens
  misc_feature (20)..(20): n is a, c, g, or t
ttgtaggcacaagaccaagntatacatcttcccctaatgcc

SEQ ID NO: 685 - DNA, 41 bp, Homo sapiens
  misc_feature (24)..(24): n is a, c, g, or t
cataggaggtatgcctataaaatnccatgggccactgagtg

SEQ ID NO: 686 - DNA, 41 bp, Homo sapiens
  misc_feature (19)..(19): n is a, c, g, or t
cttggtgcccatacgaacngaatagatggggccatattttt

SEQ ID NO: 687 - DNA, 41 bp, Homo sapiens
  misc_feature (23)..(23): n is a, c, g, or t
aacaatgcagtttccaatatcanttgctccatcaccttcgg

SEQ ID NO: 688 - DNA, 41 bp, Homo sapiens
  misc_feature (24)..(24): n is a, c, g, or t
ttatttacactcactggaaatcangtggaggggctgggccc

SEQ ID NO: 689 - DNA, 41 bp, Homo sapiens
  misc_feature (19)..(19): n is a, c, g, or t
ccgattcctgaaccctganggatcagagaagaaagactttt

SEQ ID NO: 690 - DNA, 41 bp, Homo sapiens
  misc_feature (19)..(19): n is a, c, g, or t
cccagaacccttggactcnccagtaacattgattgagttgt

SEQ ID NO: 691 - DNA, 41 bp, Homo sapiens
  misc_feature (21)..(21): n is a, c, g, or t
tcttacctgctccattttgancaggaagcaatcgataaagt

SEQ ID NO: 692 - DNA, 41 bp, Homo sapiens
  misc_feature (22)..(22): n is a, c, g, or t
aggtgttaagtgagaaggtgantatctttggcatgggcaag

SEQ ID NO: 693 - DNA, 41 bp, Homo sapiens
  misc_feature (20)..(20): n is a, c, g, or t
ctatctcctggagcctcatntatttggtgatgaaccccagg

SEQ ID NO: 694 - DNA, 41 bp, Homo sapiens
  misc_feature (19)..(19): n is a, c, g, or t
tctgggacaccagtgacanactaggaaggaatgatagtgtt

SEQ ID NO: 695 - DNA, 41 bp, Homo sapiens
  misc_feature (21)..(21): n is a, c, g, or t
tgagactaactcagggaaccncttccactacttcagctatg

SEQ ID NO: 696 - DNA, 41 bp, Homo sapiens
  misc_feature (18)..(18): n is a, c, g, or t
caccgcctctgcgctgtncctcaggtgtaatattgttaaga

SEQ ID NO: 697 - DNA, 41 bp, Homo sapiens
  misc_feature (19)..(19): n is a, c, g, or t
cctggccaatcactctgtnaatctcagcttgtactttttct

SEQ ID NO: 698 - DNA, 41 bp, Homo sapiens
  misc_feature (22)..(22): n is a, c, g, or t
tctcatgaaataccctgagatngaaggtaggcaagtgactg

SEQ ID NO: 699 - DNA, 41 bp, Homo sapiens
  misc_feature (21)..(21): n is a, c, g, or t
tatagactgggagactaggangcactttccagaataatggg

SEQ ID NO: 700 - DNA, 41 bp, Homo sapiens
  misc_feature (22)..(22): n is a, c, g, or t
atgtatgacaaaggacccttcngggtaggtggatggttctg

SEQ ID NO: 701 - DNA, 41 bp, Homo sapiens
  misc_feature (23)..(23): n is a, c, g, or t
cattgctaaactgatgacttacnatgggatggggtccagtc

SEQ ID NO: 702 - DNA, 41 bp, Homo sapiens
  misc_feature (22)..(22): n is a, c, g, or t
gaagagagaggaatctggtacntggaccaaatcaggagaga

SEQ ID NO: 703 - DNA, 41 bp, Homo sapiens
  misc_feature (23)..(23): n is a, c, g, or t
tgatcaagttgtgagaagaaatnggggtggatggtgtctcc

SEQ ID NO: 704 - DNA, 41 bp, Homo sapiens
  misc_feature (20)..(20): n is a, c, g, or t
tgggtacctgtcctccattngttgtcgagatgattcttgtt

SEQ ID NO: 705 - DNA, 41 bp, Homo sapiens
  misc_feature (20)..(20): n is a, c, g, or t
gctcttccaagtactgaggnttcagtttttcctgagaggaa

SEQ ID NO: 706 - DNA, 41 bp, Homo sapiens
  misc_feature (21)..(21): n is a, c, g, or t
agacttgcagagcttgttttntttcatcctgtccgtaaggg

SEQ ID NO: 707 - DNA, 41 bp, Homo sapiens
  misc_feature (20)..(20): n is a, c, g, or t
gagtttgctgttccagcaantaccaatggttgagattgacg

SEQ ID NO: 708 - DNA, 41 bp, Homo sapiens
  misc_feature (20)..(20): n is a, c, g, or t
aaccagccatagaggtcaanaacatgcaagaccagtattct

SEQ ID NO: 709 - DNA, 41 bp, Homo sapiens
  misc_feature (21)..(21): n is a, c, g, or t
ggctatagctttgactttccntttctggaagattccgtcaa

SEQ ID NO: 710 - DNA, 41 bp, Homo sapiens
  misc_feature (22)..(22): n is a, c, g, or t
agcgtgattgaatttacagaancctctgctgtctttgaaga

SEQ ID NO: 711 - DNA, 41 bp, Homo sapiens
  misc_feature (5)..(5): n is a, c, g, or t
  misc_feature (22)..(22): n is a, c, g, or t
ctaangtgaaggaattcacagngacctcggccatttttgag

SEQ ID NO: 712 - DNA, 41 bp, Homo sapiens
  misc_feature (20)..(20): n is a, c, g, or t
cagagggcaggtactatccncaacttgagaaaaacaacgag

SEQ ID NO: 713 - DNA, 41 bp, Homo sapiens
  misc_feature (7)..(7): n is a, c, g, or t
  misc_feature (20)..(20): n is a, c, g, or t
ccagtcnaattcattccgcnagtaggagatgactttcttca

SEQ ID NO: 714 - DNA, 41 bp, Homo sapiens
  misc_feature (22)..(22): n is a, c, g, or t
tgaaaagtgggtgaggttcaantacccaaagctcatctcct

SEQ ID NO: 715 - DNA, 41 bp, Homo sapiens
  misc_feature (21)..(21): n is a, c, g, or t
  misc_feature (41)..(41): n is a, c, g, or t
aggtggagattctcaacaganaccctcacttcaagactaan

SEQ ID NO: 716 - DNA, 41 bp, Homo sapiens
  misc_feature (23)..(23): n is a, c, g, or t
tacttctgaaattcctcagttcnggctgccgtatgatgtag

SEQ ID NO: 717 - DNA, 41 bp, Homo sapiens
  misc_feature (20)..(20): n is a, c, g, or t
cctccttgtgaatgactggnctttgttaagagcctagtaga

SEQ ID NO: 718 - DNA, 41 bp, Homo sapiens
  misc_feature (20)..(20): n is a, c, g, or t
tggaattcctccttagggcnctgggaagagtattgcttaac

SEQ ID NO: 719 - DNA, 41 bp, Homo sapiens
  misc_feature (24)..(24): n is a, c, g, or t
ggactatttgtacacatacacacntgcacaccctctcacgt

SEQ ID NO: 720 - DNA, 41 bp, Homo sapiens
  misc_feature (23)..(23): n is a, c, g, or t
ctctattccaatgcatatctgantgatttagcaggctgcat

SEQ ID NO: 721 - DNA, 41 bp, Homo sapiens
  misc_feature (21)..(21): n is a, c, g, or t
tgtagagagcattggagaagnagtgactacagtgaaaccag

SEQ ID NO: 722 - DNA, 41 bp, Homo sapiens
  misc_feature (21)..(21): n is a, c, g, or t
gtgctatgggaggtaaagaancccttttccattgaggatgt

SEQ ID NO: 723 - DNA, 41 bp, Homo sapiens
  misc_feature (19)..(19): n is a, c, g, or t
caagcaacgggatcccaantctaactaaacaccatctggaa

SEQ ID NO: 724 - DNA, 41 bp, Homo sapiens
  misc_feature (20)..(20): n is a, c, g, or t
cacccactgcaaatgatganccctcaaaggaattctcaaaa

SEQ ID NO: 725 - DNA, 41 bp, Homo sapiens
  misc_feature (23)..(23): n is a, c, g, or t
tttgtattgcaatggtgattccnattcggccaacacacatg

SEQ ID NO: 726 - DNA, 41 bp, Homo sapiens
  misc_feature (18)..(18): n is a, c, g, or t
gggcaactggatggctgnctacaccctaagtaattatcatg

SEQ ID NO: 727 - DNA, 41 bp, Homo sapiens
  misc_feature (21)..(21): n is a, c, g, or t
atcaatgtaagaaagccccantggtactatgggagtctccc

SEQ ID NO: 728 - DNA, 41 bp, Homo sapiens
  misc_feature (21)..(21): n is a, c, g, or t
aagagttcctgtcactgttgngcatgatgctaggaatcttc

SEQ ID NO: 729 - DNA, 42 bp, Homo sapiens
  misc_feature (22)..(22): n is a, c, g, or t
  misc_feature (40)..(40): n is a, c, g, or t
gattttgcttgcactgaaaaangaagccaaattcatcccnct

SEQ ID NO: 730 - DNA, 42 bp, Homo sapiens
  misc_feature (20)..(20): n is a, c, g, or t
  misc_feature (36)..(36): n is a, c, g, or t
gtgcctcctttctactggtntttgtcttaattggcnattttg

SEQ ID NO: 731 - DNA, 42 bp, Homo sapiens
  misc_feature (23)..(24): n is a, c, g, or t
agttctgatagcagaaaaaaganncaggatttccacagaaga

SEQ ID NO: 732 - DNA, 42 bp, Homo sapiens
  misc_feature (19)..(20): n is a, c, g, or t
tggagacaccacccacccnngtttcttcttacaatgtgatca

SEQ ID NO: 733 - DNA, 42 bp, Homo sapiens
  misc_feature (21)..(21): n is a, c, g, or t
  misc_feature (38)..(38): n is a, c, g, or t
attgtgtccgtaaagcctaangtgaaggaattcacagngacc

SEQ ID NO: 734 - DNA, 42 bp, Homo sapiens
  misc_feature (21)..(21): n is a, c, g, or t
tggagagatggtgacacttgncccaatgtctcaagtaagtag

SEQ ID NO: 735 - DNA, 42 bp, Homo sapiens
  misc_feature (22)..(22): n is a, c, g, or t
tcaatgagttttgcgaaagatnttcctactatggaatgcgag

SEQ ID NO: 736 - DNA, 42 bp, Homo sapiens
  misc_feature (22)..(22): n is a, c, g, or t
aaactgcaaaaggagattgatncagttttgcccaataaggtg

SEQ ID NO: 737 - DNA, 42 bp, Homo sapiens
  misc_feature (21)..(21): n is a, c, g, or t
gatgaggaaactaaggctcanaaaaatccatttgctcaagga

SEQ ID NO: 738 - DNA, 42 bp, Homo sapiens
  misc_feature (24)..(24): n is a, c, g, or t
agaaaattgaagatggggtatttngtggggaacaagctatgc

SEQ ID NO: 739 - DNA, 42 bp, Homo sapiens
  misc_feature (24)..(24): n is a, c, g, or t
cttaaccttttagttcctaagganggtctgaagagccaagag

SEQ ID NO: 740 - DNA, 42 bp, Homo sapiens
  misc_feature (21)..(21): n is a, c, g, or t
agggtcatttggtcatccagntgtaagttcctgaaacctgaa

SEQ ID NO: 741 - DNA, 42 bp, Homo sapiens
  misc_feature (21)..(21): n is a, c, g, or t
ccaaagaaagctggaaccatnctgactttgtacactgtgagg

SEQ ID NO: 742 - DNA, 42 bp, Homo sapiens
  misc_feature (1)..(1): n is a, c, g, or t
  misc_feature (19)..(19): n is a, c, g, or t
ncgagaaaacctccctctngtcctaaagaaagtatccttcac

SEQ ID NO: 743 - DNA, 42 bp, Homo sapiens
  misc_feature (20)..(20): n is a, c, g, or t
tcagaatcttagaggctgcnggtggtcagattatcattgatg

SEQ ID NO: 744 - DNA, 42 bp, Homo sapiens
  misc_feature (19)..(19): n is a, c, g, or t
cgtcattcctcttggcatnatttatgtatctgttcaggtagg

SEQ ID NO: 745 - DNA, 42 bp, Homo sapiens
  misc_feature (22)..(22): n is a, c, g, or t
ccaggtatctgtggtcacattntctgtttatgtcctggtgga

SEQ ID NO: 746 - DNA, 42 bp, Homo sapiens
  misc_feature (20)..(20): n is a, c, g, or t
atctcctttgcaagtgaccntgacacatatttgtggattgga

SEQ ID NO: 747 - DNA, 42 bp, Homo sapiens
  misc_feature (21)..(21): n is a, c, g, or t
ggctattgacagaggaacaangggtatcagttttgtcctgag

SEQ ID NO: 748 - DNA, 42 bp, Homo sapiens
  misc_feature (23)..(23): n is a, c, g, or t
ctgtttcttttctgtccagatantctcggcatttagtgacaa

SEQ ID NO: 749 - DNA, 42 bp, Homo sapiens
  misc_feature (20)..(20): n is a, c, g, or t
gcttctcgatggtcaagaancaaagaaactcaatgtccagtg

SEQ ID NO: 750 - DNA, 42 bp, Homo sapiens
  misc_feature (25)..(25): n is a, c, g, or t
atctaatttcagtttttaggtcacncaagccagtgggagtca

SEQ ID NO: 751 - DNA, 42 bp, Homo sapiens
  misc_feature (23)..(23): n is a, c, g, or t
gcttagctctccatttaaaaagntttctttccactggtgtgc

SEQ ID NO: 752 - DNA, 42 bp, Homo sapiens
  misc_feature (23)..(23): n is a, c, g, or t
caacaccaaagaaattcccatgnaaagagtcatagcagctgc

SEQ ID NO: 753 - DNA, 42 bp, Homo sapiens
  misc_feature (21)..(21): n is a, c, g, or t
tgcttttggtggtgagaaaanagaggttgaaaggttggttaa

SEQ ID NO: 754 - DNA, 42 bp, Homo sapiens
  misc_feature (22)..(22): n is a, c, g, or t
tggcacaatgacagatgttttnattgactacgacgttgagtt

SEQ ID NO: 755 - DNA, 42 bp, Homo sapiens
  misc_feature (24)..(24): n is a, c, g, or t
aagcacataacatgtttgatttcntaggttcgcagcaagaac

SEQ ID NO: 756 - DNA, 42 bp, Homo sapiens
  misc_feature (24)..(24): n is a, c, g, or t
cattggaaacttgacatttttccnccaggtaagggctgtctt

SEQ ID NO: 757 - DNA, 42 bp, Homo sapiens
  misc_feature (22)..(22): n is a, c, g, or t
atcatccccttaccttattggntaaaactgcgtcaatctcct

SEQ ID NO: 758 - DNA, 42 bp, Homo sapiens
  misc_feature (22)..(22): n is a, c, g, or t
aggcagagaaaattagagaganagacagacaaagcttaggaa

SEQ ID NO: 759 - DNA, 42 bp, Homo sapiens
  misc_feature (22)..(22): n is a, c, g, or t
ggtcaatggtggtgattccaanttatgctcttcaccatgacc

SEQ ID NO: 760 - DNA, 42 bp, Homo sapiens
  misc_feature (22)..(22): n is a, c, g, or t
gtgggatttatgaaaagtgccntctctatagctgaggatgaa

SEQ ID NO: 761 - DNA, 42 bp, Homo sapiens
  misc_feature (20)..(20): n is a, c, g, or t
gccaagggtagagttcagtntgaacaaagcaatttgagaaca

SEQ ID NO: 762 - DNA, 42 bp, Homo sapiens
  misc_feature (22)..(22): n is a, c, g, or t
tcttcaaggtgtaaaatgctcngtctctgatgtacaacgagg

SEQ ID NO: 763 - DNA, 42 bp, Homo sapiens
  misc_feature (18)..(18): n is a, c, g, or t
actgtgtccccggtctgnaaacctgcataaaatcatacattt

SEQ ID NO: 764 - DNA, 42 bp, Homo sapiens
  misc_feature (22)..(22): n is a, c, g, or t
agaaagaacacacaggagatantgaaacttctttcccaggag

SEQ ID NO: 765 - DNA, 42 bp, Homo sapiens
  misc_feature (19)..(19): n is a, c, g, or t
gggtcaccctccttctcanaacacattataaaaaccttccgt

SEQ ID NO: 766 - DNA, 42 bp, Homo sapiens
  misc_feature (24)..(24): n is a, c, g, or t
gaataaaatatgaattgagggccngggacggtaggtcatgtc

SEQ ID NO: 767 - DNA, 42 bp, Homo sapiens
  misc_feature (22)..(22): n is a, c, g, or t
caatgctatatgtcagttgagnttctaagacttggaagccac

SEQ ID NO: 768 - DNA, 42 bp, Homo sapiens
  misc_feature (23)..(23): n is a, c, g, or t
gaatacttggaggaacttcctanaatgatgcagcacttctca

SEQ ID NO: 769 - DNA, 42 bp, Homo sapiens
  misc_feature (14)..(14): n is a, c, g, or t
  misc_feature (21)..(21): n is a, c, g, or t
ttcctcaggttgantaaaggncagaagaaggatcatttcacc

SEQ ID NO: 770 - DNA, 42 bp, Homo sapiens
  misc_feature (21)..(21): n is a, c, g, or t
gggatgttaccactgaaaggnatggtaaaaaagaatcggctg

SEQ ID NO: 771 - DNA, 42 bp, Homo sapiens
  misc_feature (22)..(22): n is a, c, g, or t
ggagtatttcctcctctacttnagaagtcaaccatagcagtg

SEQ ID NO: 772 - DNA, 42 bp, Homo sapiens
  misc_feature (23)..(23): n is a, c, g, or t
tgtgtatcccaacctaccaaaanagtcctttccaggtaaggc

SEQ ID NO: 773 - DNA, 42 bp, Homo sapiens
  misc_feature (19)..(19): n is a, c, g, or t
aagctcgttgggtgacaanagttttcaaaggtaagtgtgtag

SEQ ID NO: 774 - DNA, 42 bp, Homo sapiens
  misc_feature (18)..(18): n is a, c, g, or t
tgtagcctgccctcaganagaactatgatgatggacattatc

SEQ ID NO: 775 - DNA, 42 bp, Homo sapiens
  misc_feature (21)..(21): n is a, c, g, or t
agagacatatgggagtccagnagacatcaatcaaactggact

SEQ ID NO: 776 - DNA, 42 bp, Homo sapiens
  misc_feature (20)..(20): n is a, c, g, or t
aatggccggattgaagtttntaaatccttttggtcttgctag

SEQ ID NO: 777 - DNA, 42 bp, Homo sapiens
  misc_feature (10)..(10): n is a, c, g, or t
  misc_feature (21)..(21): n is a, c, g, or t
cttgagacangtgaagttgcnaattctgctttgtgcttttga

SEQ ID NO: 778 - DNA, 42 bp, Homo sapiens
  misc_feature (22)..(22): n is a, c, g, or t
ggcttggtgtctttcttgtttnatggctgtgtttttgctttt

SEQ ID NO: 779 - DNA, 42 bp, Homo sapiens
  misc_feature (23)..(23): n is a, c, g, or t
cacatatttgtatgcagtagagngcctgttgtagaaaacgct

SEQ ID NO: 780 - DNA, 42 bp, Homo sapiens
  misc_feature (24)..(24): n is a, c, g, or t
tgtatcaaacagtattactggtcntggagtactggctgatgg

SEQ ID NO: 781 - DNA, 42 bp, Homo sapiens
  misc_feature (22)..(22): n is a, c, g, or t
tgtgtccaatctagatcccaanttctcatttgaaggcaccaa

SEQ ID NO: 782 - DNA, 42 bp, Homo sapiens
  misc_feature (24)..(24): n is a, c, g, or t
ggtaacagatgatggtcaaaatgntaacagcacaggctgtga

SEQ ID NO: 783 - DNA, 42 bp, Homo sapiens
  misc_feature (21)..(21): n is a, c, g, or t
ctccagactctttgtgtcagnagaatcaaacacatgttccca

SEQ ID NO: 784 - DNA, 42 bp, Homo sapiens
  misc_feature (21)..(21): n is a, c, g, or t
ctgcattctaggaatcttggngtccacatctgttcctcaatg

SEQ ID NO: 785 - DNA, 42 bp, Homo sapiens
  misc_feature (21)..(21): n is a, c, g, or t
gctgtaccccacattcattangtgagtgcattttccttagaa

SEQ ID NO: 786 - DNA, 42 bp, Homo sapiens
  misc_feature (21)..(21): n is a, c, g, or t
ggctggttaataggctacatnctgagtaagaatgtttgtgct

SEQ ID NO: 787 - DNA, 43 bp, Homo sapiens
  misc_feature (26)..(27): n is a, c, g, or t
acaatcatattaatagaagagtcttnnttccagacgcagtcca

SEQ ID NO: 788 - DNA, 43 bp, Homo sapiens
  misc_feature (22)..(22): n is a, c, g, or t
  misc_feature (39)..(39): n is a, c, g, or t
ctctcatctaagacttctgtcngtattgaattgtctctnctcc

SEQ ID NO: 789 - DNA, 43 bp, Homo sapiens
  misc_feature (21)..(22): n is a, c, g, or t
tctcttctgtggaaatcctgnntcttttttctgctatcagaac

SEQ ID NO: 790 - DNA, 43 bp, Homo sapiens
  misc_feature (20)..(20): n is a, c, g, or t
  misc_feature (29)..(29): n is a, c, g, or t
cgcaaggcaatcacattccnaatgagttngttaaaaaagccat

SEQ ID NO: 791 - DNA, 43 bp, Homo sapiens
  misc_feature (22)..(22): n is a, c, g, or t
  misc_feature (36)..(36): n is a, c, g, or t
gacatgatttgggatagaggancattagttgccatnaatccag

SEQ ID NO: 792 - DNA, 43 bp, Homo sapiens
  misc_feature (25)..(26): n is a, c, g, or t
tttgatcacattgtaagaagaaacnngggtgggtggtgtctcc

SEQ ID NO: 793 - DNA, 42 bp, Homo sapiens
  misc_feature (23)..(23): n is a, c, g, or t
ctcttttcaatgaatagcacttntgttactggtgtccagctg

SEQ ID NO: 794 - DNA, 43 bp, Homo sapiens
  misc_feature (21)..(21): n is a, c, g, or t
gggtcaggacagaatctaggnagtcatcagagttttgtcttct

SEQ ID NO: 795 - DNA, 43 bp, Homo sapiens
  misc_feature (22)..(22): n is a, c, g, or t
aggtaaaggatacagaaagcanaacaaccaatgggatgacaac

SEQ ID NO: 796 - DNA, 43 bp, Homo sapiens
  misc_feature (20)..(20): n is a, c, g, or t
actatccactgagcattgcnttcattgtggtgaatgaattctg

SEQ ID NO: 797 - DNA, 43 bp, Homo sapiens
  misc_feature (25)..(25): n is a, c, g, or t
tattgaaattaggttgacattgtgncggaatctctgttgagct

SEQ ID NO: 798 - DNA, 43 bp, Homo sapiens
  misc_feature (23)..(23): n is a, c, g, or t
gcacatctaattgactctagttnagcatttcaaccaggtttct

SEQ ID NO: 799 - DNA, 43 bp, Homo sapiens
  misc_feature (23)..(23): n is a, c, g, or t
atctttaggtacatctctggttnctctcgttgttcctgtttcc

SEQ ID NO: 800 - DNA, 43 bp, Homo sapiens
  misc_feature (26)..(26): n is a, c, g, or t
actgatgtacattaaacaaactatcnagtccctgcaatgcagt

SEQ ID NO: 801 - DNA, 43 bp, Homo sapiens
  misc_feature (21)..(21): n is a, c, g, or t
ctttcatgtggaccagggatntgaactgtgtttcttccaaact

SEQ ID NO: 802 - DNA, 43 bp, Homo sapiens
  misc_feature (22)..(22): n is a, c, g, or t
cttaccaagcagaagattctcntcatatccttcagtttgagct

SEQ ID NO: 803 - DNA, 43 bp, Homo sapiens
  misc_feature (22)..(22): n is a, c, g, or t
cgttgcaggaactattgttttnttaccaggattttcagaggtt

SEQ ID NO: 804 - DNA, 43 bp, Homo sapiens
  misc_feature (25)..(25): n is a, c, g, or t
gacatacagttctaaatcacaaaantcagtagctgagctttcc

SEQ ID NO: 805 - DNA, 43 bp, Homo sapiens
  misc_feature (21)..(21): n is a, c, g, or t
gtagatatgggacccgtacanatggactttttaagagactggg

SEQ ID NO: 806 - DNA, 43 bp, Homo sapiens
  misc_feature (22)..(22): n is a, c, g, or t
ccactcatagaaaaattagcgnagatttatgtcaactcctcct

SEQ ID NO: 807 - DNA, 43 bp, Homo sapiens
  misc_feature (21)..(21): n is a, c, g, or t
ccattcatcagcctcgatatnccatcttcaagttgtttgatag

SEQ ID NO: 808 - DNA, 43 bp, Homo sapiens
  misc_feature (22)..(22): n is a, c, g, or t
aaagagctcttttgtctttcantatctcttccctgtttggacc

SEQ ID NO: 809 - DNA, 43 bp, Homo sapiens
  misc_feature (23)..(23): n is a, c, g, or t
ttaaaggtgctttgatactgaangacacaaatgtgaccgtcca

SEQ ID NO: 810 - DNA, 43 bp, Homo sapiens
  misc_feature (22)..(22): n is a, c, g, or t
acctccctgaaattgcatatangtatatagacatgcacacgtg

SEQ ID NO: 811 - DNA, 43 bp, Homo sapiens
  misc_feature (22)..(22): n is a, c, g, or t
accagttaagatctagcttctnggttacatttcctcctccatt

SEQ ID NO: 812 - DNA, 43 bp, Homo sapiens
  misc_feature (20)..(20): n is a, c, g, or t
ctgcttccatctctaggtanatttgtgttcatagcacatttct

SEQ ID NO: 813 - DNA, 43 bp, Homo sapiens
  misc_feature (14)..(14): n is a, c, g, or t
  misc_feature (24)..(24): n is a, c, g, or t
taggattgttttcnatattcttcntcatccttgcgtttgtgat

SEQ ID NO: 814 - DNA, 43 bp, Homo sapiens
  misc_feature (21)..(21): n is a, c, g, or t
gaatggcaccataaaggacancatcctttttggaacagagttt

SEQ ID NO: 815 - DNA, 43 bp, Homo sapiens
  misc_feature (26)..(26): n is a, c, g, or t
caatcatattaatagaagagtcttcnttccagacgcagtccag

SEQ ID NO: 816 - DNA, 43 bp, Homo sapiens
  misc_feature (23)..(23): n is a, c, g, or t
aatgaaagaaactagggtccatntgagggaaaacccaatgtca

SEQ ID NO: 817 - DNA, 43 bp, Homo sapiens
  misc_feature (23)..(23): n is a, c, g, or t
cagtaaagaatcccatcactatnccttttctaattccccaacg

SEQ ID NO: 818 - DNA, 43 bp, Homo sapiens
  misc_feature (24)..(24): n is a, c, g, or t
gtttttctcatcaggttacaagangagaagaaaggtgatggcg

SEQ ID NO: 819 - DNA, 43 bp, Homo sapiens
  misc_feature (21)..(21): n is a, c, g, or t
caattacctagatcccccctnaacaattgtttcaccaaggaac

SEQ ID NO: 820 - DNA, 43 bp, Homo sapiens
  misc_feature (24)..(24): n is a, c, g, or t
tctcactgggatttttattctttntaccttgcaggactagtcc

SEQ ID NO: 821 - DNA, 43 bp, Homo sapiens
  misc_feature (21)..(21): n is a, c, g, or t
ttcagaaagggatcttgtggnttgttgagagaatccaagttca

SEQ ID NO: 822 - DNA, 43 bp, Homo sapiens
  misc_feature (20)..(20): n is a, c, g, or t
ctgaggatgacctggagaanctccttctaattaaatggtgtgt

SEQ ID NO: 823 - DNA, 43 bp, Homo sapiens
  misc_feature (23)..(23): n is a, c, g, or t
agtcagggatgttattatggtcntgccctgaaaatagcaaaac

SEQ ID NO: 824 - DNA, 43 bp, Homo sapiens
  misc_feature (21)..(21): n is a, c, g, or t
agttctgggtgaatatgcttnacccaaaggagtaagtagaatt

SEQ ID NO: 825 - DNA, 43 bp, Homo sapiens
  misc_feature (18)..(18): n is a, c, g, or t
agtgcctggcatgcaagnataagaggttctttacataacattt

SEQ ID NO: 826 - DNA, 43 bp, Homo sapiens
  misc_feature (21)..(21): n is a, c, g, or t
ttttttgcagaccctctcaantctcatagcaattgggaataat

SEQ ID NO: 827 - DNA, 43 bp, Homo sapiens
  misc_feature (22)..(22): n is a, c, g, or t
caccaagtttggaataagcttnacagttccttttctgaatcag

SEQ ID NO: 828 - DNA, 43 bp, Homo sapiens
  misc_feature (26)..(26): n is a, c, g, or t
ccatctctgacatttgaaatatatanggtgccctttggcaaag

SEQ ID NO: 829 - DNA, 43 bp, Homo sapiens
  misc_feature (20)..(20): n is a, c, g, or t
cactaatggccttacacganatggaggattttacatttgatgg

SEQ ID NO: 830 - DNA, 43 bp, Homo sapiens
  misc_feature (19)..(19): n is a, c, g, or t
tgcccaaacctggtgatgnatcccttactatttagaataagga

SEQ ID NO: 831 - DNA, 43 bp, Homo sapiens
  misc_feature (23)..(23): n is a, c, g, or t
gataccagaatccattctcttcngtcaaacggaagacacaagg

SEQ ID NO: 832 - DNA, 43 bp, Homo sapiens
  misc_feature (22)..(22): n is a, c, g, or t
gcagatgtgattttactccaanccattttagctctagaagaga

SEQ ID NO: 833 - DNA, 43 bp, Homo sapiens
  misc_feature (19)..(19): n is a, c, g, or t
ggaagcctcccatggatgngaaatctttagaagaatcaaggaa

SEQ ID NO: 834 - DNA, 43 bp, Homo sapiens
  misc_feature (24)..(24): n is a, c, g, or t
cattcatctctgactggttatatntccagaagatgaacacgtg

SEQ ID NO: 835 - DNA, 43 bp, Homo sapiens
  misc_feature (22)..(22): n is a, c, g, or t
tgatgctgtaatggtttgttcnggacatcatgtgtatcccaac

SEQ ID NO: 836 - DNA, 43 bp, Homo sapiens
  misc_feature (23)..(23): n is a, c, g, or t
agcaagtatctatcaatctgtcnttaccaacaccagcaaagaa

SEQ ID NO: 837 - DNA, 43 bp, Homo sapiens
  misc_feature (22)..(22): n is a, c, g, or t
catcaaccaagtcacaattggngttgggagggaatttctcaac

SEQ ID NO: 838 - DNA, 43 bp, Homo sapiens
  misc_feature (21)..(21): n is a, c, g, or t
caaccttcaaatgcacagaantcttagttatcattctctagca

SEQ ID NO: 839 - DNA, 43 bp, Homo sapiens
  misc_feature (20)..(20): n is a, c, g, or t
ggaccttatctggaacagcncaagaaaatcatagcagaaaaca

SEQ ID NO: 840 - DNA, 43 bp, Homo sapiens
  misc_feature (24)..(24): n is a, c, g, or t
acataaagcaaatttaggcttttntccttctgcaatacatgca

SEQ ID NO: 841 - DNA, 43 bp, Homo sapiens
  misc_feature (22)..(22): n is a, c, g, or t
cccttgatggatggagatttangcaatgtgttttactgggtag

SEQ ID NO: 842 - DNA, 43 bp, Homo sapiens
  misc_feature (21)..(21): n is a, c, g, or t
ctggtagcaaaggattgactntttttccagaggagctaataat

SEQ ID NO: 843 - DNA, 43 bp, Homo sapiens
  misc_feature (22)..(22): n is a, c, g, or t
catttcctttagcacttcctgnatgggtttcttgtagtcttga

SEQ ID NO: 844 - DNA, 43 bp, Homo sapiens
  misc_feature (22)..(22): n is a, c, g, or t
ctgactgtcctgattggaatcntcaccctttttttccctgaaa

SEQ ID NO: 845 - DNA, 43 bp, Homo sapiens
  misc_feature (22)..(22): n is a, c, g, or t
cactttcttattgcaactcagnctgcaattgtgatgaaagtca

SEQ ID NO: 846 - DNA, 43 bp, Homo sapiens
  misc_feature (20)..(20): n is a, c, g, or t
ctcaatagagcatcacctgngatagtgggaaaaggtaagaatt

SEQ ID NO: 847 - DNA, 43 bp, Homo sapiens
  misc_feature (23)..(23): n is a, c, g, or t
tttatcactcaatagagcatcanctgagatagtgggaaaaggt

SEQ ID NO: 848 - DNA, 43 bp, Homo sapiens
  misc_feature (23)..(23): n is a, c, g, or t
ataactgggagtcttatatccanaaggctttgtcacaaggtat

SEQ ID NO: 849 - DNA, 44 bp, Homo sapiens
  misc_feature (22)..(22): n is a, c, g, or t
  misc_feature (39)..(39): n is a, c, g, or t
tactcaaataggtggtaggagnagagacaattcaatacngacag

SEQ ID NO: 850 - DNA, 44 bp, Homo sapiens
  misc_feature (18)..(18): n is a, c, g, or t
  misc_feature (21)..(21): n is a, c, g, or t
gtcccagttgcagccctnttnttatgtatttactcttcaatttc

SEQ ID NO: 851 - DNA, 44 bp, Homo sapiens
  misc_feature (20)..(20): n is a, c, g, or t
acagaagttccaggactggntttccagtacatctttaaacaagg

SEQ ID NO: 852 - DNA, 44 bp, Homo sapiens
  misc_feature (25)..(25): n is a, c, g, or t
cctttcattccataataggaaaagngctcgcagaattcattcac

SEQ ID NO: 853 - DNA, 44 bp, Homo sapiens
  misc_feature (22)..(22): n is a, c, g, or t
gaaacacaggaccattgtgtcnctctccattgtctacacaattg

SEQ ID NO: 854 - DNA, 44 bp, Homo sapiens
  misc_feature (22)..(22): n is a, c, g, or t
accatgccatataaaaagagcngtgttaatgtttcatgccatga

SEQ ID NO: 855 - DNA, 44 bp, Homo sapiens
  misc_feature (21)..(21): n is a, c, g, or t
tcattttcttccctgtgaggnttaaaatgaacctcaggaaatgc

SEQ ID NO: 856 - DNA, 44 bp, Homo sapiens
  misc_feature (23)..(23): n is a, c, g, or t
tctggatgtttaaccttaccaancagaagattctcgtcatatcc

SEQ ID NO: 857 - DNA, 44 bp, Homo sapiens
  misc_feature (23)..(23): n is a, c, g, or t
tcttgaatccacctttagaacantgggtttttctggttgaagaa

SEQ ID NO: 858 - DNA, 44 bp, Homo sapiens
  misc_feature (23)..(23): n is a, c, g, or t
tgcaacagttctttataatcccnctgtaattagcccagaagaac

SEQ ID NO: 859 - DNA, 44 bp, Homo sapiens
  misc_feature (21)..(21): n is a, c, g, or t
ctgcttcatctgtttctgtantactttcttctctcttccttaaa

SEQ ID NO: 860 - DNA, 44 bp, Homo sapiens
  misc_feature (22)..(22): n is a, c, g, or t
gaacggattaacagggtcattnaagagttaggtctggataaagt

SEQ ID NO: 861 - DNA, 44 bp, Homo sapiens
  misc_feature (23)..(23): n is a, c, g, or t
aaaaacctgtactctctttcagnaaggagatttccaagattctg

SEQ ID NO: 862 - DNA, 44 bp, Homo sapiens
  misc_feature (24)..(24): n is a, c, g, or t
gtgactttttctttacctgaatgntcttactcttggtggacagt

SEQ ID NO: 863 - DNA, 44 bp, Homo sapiens
  misc_feature (25)..(25): n is a, c, g, or t
tgatattcaaagatgggttcttttngtgtcctggaagagcatca

SEQ ID NO: 864 - DNA, 44 bp, Homo sapiens
  misc_feature (21)..(21): n is a, c, g, or t
ccacatcaatcatggtgggancagtaataacagcattgattgtt

SEQ ID NO: 865 - DNA, 44 bp, Homo sapiens
  misc_feature (23)..(23): n is a, c, g, or t
ctgagtgctttggtatttaatcntcttcccatcatgtttgaagt

SEQ ID NO: 866 - DNA, 44 bp, Homo sapiens
  misc_feature (21)..(21): n is a, c, g, or t
accagtgaagggaaggaattngggttgatttaagaagagaatcc

SEQ ID NO: 867 - DNA, 44 bp, Homo sapiens
  misc_feature (25)..(25): n is a, c, g, or t
agtggaaaaattagtttatagaggntacaggctgagaattccag

SEQ ID NO: 868 - DNA, 44 bp, Homo sapiens
  misc_feature (21)..(21): n is a, c, g, or t
acactttgaactcctcaaggncagagaactgtctttcatttttg

SEQ ID NO: 869 - DNA, 44 bp, Homo sapiens
  misc_feature (25)..(25): n is a, c, g, or t
gaagaagtatgaaaaaaaattgctntcactatctcagtagcctg

SEQ ID NO: 870 - DNA, 44 bp, Homo sapiens
  misc_feature (23)..(23): n is a, c, g, or t
caaaattttccccaatacaacgntgacgccctaaaaaaaagaaa

SEQ ID NO: 871 - DNA, 44 bp, Homo sapiens
  misc_feature (23)..(23): n is a, c, g, or t
gcaaaacttaaggcacttttcanaaatcccattggacctaaagg

SEQ ID NO: 872 - DNA, 44 bp, Homo sapiens
  misc_feature (22)..(22): n is a, c, g, or t
gctgtaacctgtagggaaatantggaacaatcatccataagagg

SEQ ID NO: 873 - DNA, 44 bp, Homo sapiens
  misc_feature (22)..(22): n is a, c, g, or t
gttttctttgaaggtcttggcngattttatgggcagaatagatg

SEQ ID NO: 874 - DNA, 44 bp, Homo sapiens
  misc_feature (23)..(23): n is a, c, g, or t
ctttcagacaggcttttaaatanggcatattcctcaaatcttct

SEQ ID NO: 875 - DNA, 44 bp, Homo sapiens
  misc_feature (26)..(26): n is a, c, g, or t
tcaatttttccttcaatatcttgaanctgggcagaaactggagt

SEQ ID NO: 876 - DNA, 44 bp, Homo sapiens
  misc_feature (21)..(21): n is a, c, g, or t
cacagactcgagtttttcccnaaacccaatgaatttactcttga

SEQ ID NO: 877 - DNA, 44 bp, Homo sapiens
  misc_feature (19)..(19): n is a, c, g, or t
ccgtgctacatgatgacanagaatttcctaatccaaatatcttt

SEQ ID NO: 878 - DNA, 44 bp, Homo sapiens
  misc_feature (24)..(24): n is a, c, g, or t
agtgctagtgaaagaatgttattntgtcttcacaaatcgaaggg

SEQ ID NO: 879 - DNA, 44 bp, Homo sapiens
  misc_feature (23)..(23): n is a, c, g, or t
aaggacaacatagatccttacanatacacaccctttggaagtgg

SEQ ID NO: 880 - DNA, 44 bp, Homo sapiens
  misc_feature (23)..(23): n is a, c, g, or t
ctaacctgtgtttctttacaagntttgaaggagaagttctgaag

SEQ ID NO: 881 - DNA, 44 bp, Homo sapiens
  misc_feature (21)..(21): n is a, c, g, or t
aggttggagacagcaatgatngtaatctcttccattcttcatcc

SEQ ID NO: 882 - DNA, 44 bp, Homo sapiens
  misc_feature (25)..(25): n is a, c, g, or t
accaacaaaagtatgtttaccttangtaggggtttggcaggttt

SEQ ID NO: 883 - DNA, 44 bp, Homo sapiens
  misc_feature (20)..(20): n is a, c, g, or t
acatcatgcacttggaggancatttattttgccagtatttttcc

SEQ ID NO: 884 - DNA, 44 bp, Homo sapiens
  misc_feature (20)..(20): n is a, c, g, or t
ccttagcctggatttccttntaacatgttatcaaatctgggtat

SEQ ID NO: 885 - DNA, 44 bp, Homo sapiens
  misc_feature (22)..(22): n is a, c, g, or t
aatagagttcaagactctgagngaggaagaaatagaaaaagtgc

SEQ ID NO: 886 - DNA, 44 bp, Homo sapiens
  misc_feature (20)..(20): n is a, c, g, or t
atacctgcagacatctccancatctgtgtttactagtaaatcat

SEQ ID NO: 887 - DNA, 44 bp, Homo sapiens
  misc_feature (21)..(21): n is a, c, g, or t
gctcaccagttatcaactgangacctatcatgtatcttctgtac

SEQ ID NO: 888 - DNA, 44 bp, Homo sapiens
  misc_feature (23)..(23): n is a, c, g, or t
agccaaaataaagaagactatgntggcctaaaagaagaatttcg

SEQ ID NO: 889 - DNA, 44 bp, Homo sapiens
  misc_feature (24)..(24): n is a, c, g, or t
tgtcaaaggaaaaaagcaaaattnattgtgaatgatgagctgcc

SEQ ID NO: 890 - DNA, 44 bp, Homo sapiens
  misc_feature (22)..(22): n is a, c, g, or t
tgcctgaagattttccaaactncctgcataattctaaacttctg

SEQ ID NO: 891 - DNA, 44 bp, Homo sapiens
  misc_feature (18)..(18): n is a, c, g, or t
agggaagcgagagggtgncctttactatttgaatacagtttata

SEQ ID NO: 892 - DNA, 44 bp, Homo sapiens
  misc_feature (21)..(21): n is a, c, g, or t
gaggaggcattcttctaaagnagacttttgtgtaaaaagcaaag

SEQ ID NO: 893 - DNA, 44 bp, Homo sapiens
  misc_feature (24)..(24): n is a, c, g, or t
gaatgtattaaccctcaggatttnagtaaacccatccaggaagt

SEQ ID NO: 894 - DNA, 44 bp, Homo sapiens
  misc_feature (23)..(23): n is a, c, g, or t
caaagccatcctgaaaaatgtangtaggggaggttatcctatct

SEQ ID NO: 895 - DNA, 44 bp, Homo sapiens
  misc_feature (21)..(21): n is a, c, g, or t
ggaggaacacaccatcactcngaggttcctgataaaatacaaag

SEQ ID NO: 896 - DNA, 44 bp, Homo sapiens
  misc_feature (24)..(24): n is a, c, g, or t
atatccttcttgtttcaacttctntatttccctctaatctgcga

SEQ ID NO: 897 - DNA, 44 bp, Homo sapiens
  misc_feature (22)..(22): n is a, c, g, or t
gggatctctgtttgctaaaatntacgtggatattggatatgtag

SEQ ID NO: 898 - DNA, 44 bp, Homo sapiens
  misc_feature (23)..(23): n is a, c, g, or t
gaagacataagtaaaagcaccantatagctgcttacttgtaaca

SEQ ID NO: 899 - DNA, 44 bp, Homo sapiens
  misc_feature (23)..(23): n is a, c, g, or t
gctacaacaaaataccctaagcngagtggcttataaacaacaga

SEQ ID NO: 900 - DNA, 45 bp, Homo sapiens
  misc_feature (24)..(24): n is a, c, g, or t
  misc_feature (29)..(29): n is a, c, g, or t
atttaaaggagtatttcctcctcnacttnagaagtcaaccatagc

SEQ ID NO: 901 - DNA, 45 bp, Homo sapiens
  misc_feature (24)..(24): n is a, c, g, or t
  misc_feature (35)..(35): n is a, c, g, or t
ggttcaccattgttacatctcttntagaaagaaantgaggctcag

SEQ ID NO: 902 - DNA, 45 bp, Homo sapiens
  misc_feature (24)..(24): n is a, c, g, or t
  misc_feature (35)..(35): n is a, c, g, or t
gggctttcttacattgatgatttngctaaagaagnacattcttct

SEQ ID NO: 903 - DNA, 44 bp, Homo sapiens
  misc_feature (22)..(22): n is a, c, g, or t
cttactcttggtggacagtatngcattaattgggattacaagca

SEQ ID NO: 904 - DNA, 45 bp, Homo sapiens
  misc_feature (23)..(23): n is a, c, g, or t
gggatgaagataagaaccagaangggatttagaacctgtaacacc

SEQ ID NO: 905 - DNA, 45 bp, Homo sapiens
  misc_feature (22)..(22): n is a, c, g, or t
tcactttgtagatatgggaccngtacacatggactttttaagaga

SEQ ID NO: 906 - DNA, 45 bp, Homo sapiens
  misc_feature (20)..(20): n is a, c, g, or t
cctttgtggagagcactaanaagttcctaaaatttggtttcttag

SEQ ID NO: 907 - DNA, 45 bp, Homo sapiens
  misc_feature (22)..(22): n is a, c, g, or t
tcgattttggtgttgttcaganatactttcctgtaagttgaatgc

SEQ ID NO: 908 - DNA, 45 bp, Homo sapiens
  misc_feature (25)..(25): n is a, c, g, or t
gcctactctttgattattcttctanttgcaatgtatgagagagcc

SEQ ID NO: 909 - DNA, 45 bp, Homo sapiens
  misc_feature (23)..(23): n is a, c, g, or t
attttaggtgactgaaattgcancagtgatcataatgaggtttgt

SEQ ID NO: 910 - DNA, 45 bp, Homo sapiens
  misc_feature (23)..(23): n is a, c, g, or t
atacctgaggtatgattgacatnttcttccttaaatcgtgaagtc

SEQ ID NO: 911 - DNA, 45 bp, Homo sapiens
  misc_feature (12)..(12): n is a, c, g, or t
  misc_feature (22)..(22): n is a, c, g, or t
cgcaaggatgangaagaatatngaaaacaatcctattgcttgtag

SEQ ID NO: 912 - DNA, 45 bp, Homo sapiens
  misc_feature (22)..(22): n is a, c, g, or t
cgtattgagttcagtggtgtcnttgatgtcaaaccatcctatttc

SEQ ID NO: 913 - DNA, 45 bp, Homo sapiens
  misc_feature (26)..(26): n is a, c, g, or t
gtattatcatatcatttatctacggntggcagttaaccctattgc

SEQ ID NO: 914 - DNA, 45 bp, Homo sapiens
  misc_feature (22)..(22): n is a, c, g, or t
ccattaagcacaggaatactantccactaacctattctctttact

SEQ ID NO: 915 - DNA, 45 bp, Homo sapiens
  misc_feature (25)..(25): n is a, c, g, or t
tatgtagattgaagtactgatacangctacacagatgaacctcaa

SEQ ID NO: 916 - DNA, 45 bp, Homo sapiens
  misc_feature (23)..(23): n is a, c, g, or t
tgtcatttcccctggtttaatgnccatgttgaggtcatttagaat

SEQ ID NO: 917 - DNA, 45 bp, Homo sapiens
  misc_feature (24)..(24): n is a, c, g, or t
ggaattcagaaatgttcacttcanttacccatctcgaaaagaagt

SEQ ID NO: 918 - DNA, 45 bp, Homo sapiens
  misc_feature (26)..(26): n is a, c, g, or t
tactatcttcatttactgataaaganctcttagcgtatgcaaaag

SEQ ID NO: 919 - DNA, 45 bp, Homo sapiens
  misc_feature (23)..(23): n is a, c, g, or t
tctttttagtttcgctattcaanttggcttgacaagttgtatatg

SEQ ID NO: 920 - DNA, 45 bp, Homo sapiens
  misc_feature (22)..(22): n is a, c, g, or t
ctgaatgacctgccagtattangtgggtatacttgttatgttgag

SEQ ID NO: 921 - DNA, 45 bp, Homo sapiens
  misc_feature (27)..(27): n is a, c, g, or t
gccaattagaatacatatcttttcttnggagacgggatctcacta

SEQ ID NO: 922 - DNA, 45 bp, Homo sapiens
  misc_feature (24)..(24): n is a, c, g, or t
cttggaataaagttctgttttctntatttgcctggtattgtgtga

SEQ ID NO: 923 - DNA, 45 bp, Homo sapiens
  misc_feature (21)..(21): n is a, c, g, or t
ttgcttcctgatgaaaatggngaaggtaaaatgtaaacaaaagct

SEQ ID NO: 924 - DNA, 45 bp, Homo sapiens
  misc_feature (14)..(14): n is a, c, g, or t
  misc_feature (23)..(23): n is a, c, g, or t
gcaatcacattccnaatgagttngttaaaaaagccattcagttcg

SEQ ID NO: 925 - DNA, 45 bp, Homo sapiens
  misc_feature (27)..(27): n is a, c, g, or t
tgattctacatagaatattaactcaanggaggtcagtgagtggtg

SEQ ID NO: 926 - DNA, 45 bp, Homo sapiens
  misc_feature (19)..(19): n is a, c, g, or t
gcggaaaactcaaggaggnatgaaaataagatgagtcttaattag

SEQ ID NO: 927 - DNA, 45 bp, Homo sapiens
  misc_feature (22)..(22): n is a, c, g, or t
atgatcaaaacagtgctagtgnaagaatgttatctgtcttcacaa

SEQ ID NO: 928 - DNA, 45 bp, Homo sapiens
  misc_feature (21)..(21): n is a, c, g, or t
attttgtttctcctcccaggncttttgtatgtttgacatggaatg

SEQ ID NO: 929 - DNA, 45 bp, Homo sapiens
  misc_feature (22)..(22): n is a, c, g, or t
ggtgttgtggtgttttctctgngatcaatggtcaaaaaccttaca

SEQ ID NO: 930 - DNA, 45 bp, Homo sapiens
  misc_feature (25)..(25): n is a, c, g, or t
acaaaaggagtttaacaaaaacacntctcccatcctgtttccaaa

SEQ ID NO: 931 - DNA, 45 bp, Homo sapiens
  misc_feature (22)..(22): n is a, c, g, or t
tgcaatgcgaaaaaaataagtnaaaaaaaccattggatgaactca

SEQ ID NO: 932 - DNA, 45 bp, Homo sapiens
  misc_feature (15)..(15): n is a, c, g, or t
  misc_feature (18)..(18): n is a, c, g, or t
ccagttgcagccctnttnttatgtatttactcttcaatttcttat

SEQ ID NO: 933 - DNA, 45 bp, Homo sapiens
  misc_feature (23)..(23): n is a, c, g, or t
gaataaatgagagggaatcgacngtattcgtgcatttttggatca

SEQ ID NO: 934 - DNA, 45 bp, Homo sapiens
  misc_feature (20)..(20): n is a, c, g, or t
gaggttgaagaagtgctganaaatatatttaagatttccttgggg

SEQ ID NO: 935 - DNA, 45 bp, Homo sapiens
  misc_feature (22)..(22): n is a, c, g, or t
catggacattgaagcatatctngaaagaattggctataagaagtc

SEQ ID NO: 936 - DNA, 45 bp, Homo sapiens
  misc_feature (25)..(25): n is a, c, g, or t
tgtttaataacaaccgaatgtctantaaatgactctcctctgagc

SEQ ID NO: 937 - DNA, 45 bp, Homo sapiens
  misc_feature (23)..(23): n is a, c, g, or t
tcatgaaaagcagaaacaatgangttaccttgtttaaaggcatct

SEQ ID NO: 938 - DNA, 45 bp, Homo sapiens
  misc_feature (26)..(26): n is a, c, g, or t
aaagaaggatcttttaagatacatanagtttgaggtaggggtctc

SEQ ID NO: 939 - DNA, 45 bp, Homo sapiens
  misc_feature (23)..(23): n is a, c, g, or t
atatcctgtagtgaagatcacancatcaatgttttcttccactgt

SEQ ID NO: 940 - DNA, 45 bp, Homo sapiens
  misc_feature (20)..(20): n is a, c, g, or t
ggctgactttccagacaacntaagtgtgatttaacatctaaaaca

SEQ ID NO: 941 - DNA, 45 bp, Homo sapiens
  misc_feature (26)..(26): n is a, c, g, or t
aggtgtttttttcatttacctttacnccaaggtccttcattagct

SEQ ID NO: 942 - DNA, 45 bp, Homo sapiens
  misc_feature (21)..(21): n is a, c, g, or t
gtggagaagagaagagaacanaaagtaacttcaggtaagattttg

SEQ ID NO: 943 - DNA, 45 bp, Homo sapiens
  misc_feature (27)..(27): n is a, c, g, or t
atgaattcaaatatctttattagaccnggggctaaccaggtgaag

SEQ ID NO: 944 - DNA, 45 bp, Homo sapiens
  misc_feature (25)..(25): n is a, c, g, or t
gtcaaagatattgaaagtcaagaancaggacacaggaatgaagta

SEQ ID NO: 945 - DNA, 45 bp, Homo sapiens
  misc_feature (24)..(24): n is a, c, g, or t
tgtttcctacagaaaccacatacngtgtcatacctcctttccaaa

SEQ ID NO: 946 - DNA, 45 bp, Homo sapiens
  misc_feature (22)..(22): n is a, c, g, or t
ctcttagatctacaatggctanaaattattatctcatgcttggga

SEQ ID NO: 947 - DNA, 45 bp, Homo sapiens
  misc_feature (23)..(23): n is a, c, g, or t
ctgatctcccagaataagaatgntgaagccatgagaatcattaag

SEQ ID NO: 948 - DNA, 45 bp, Homo sapiens
  misc_feature (23)..(23): n is a, c, g, or t
gggaactggaagtattttgacanctttaccacatttcttcatggg

SEQ ID NO: 949 - DNA, 45 bp, Homo sapiens
  misc_feature (24)..(24): n is a, c, g, or t
tgggtcatacatgtggatatatgngttcatgggtaatatgcttcg

SEQ ID NO: 950 - DNA, 45 bp, Homo sapiens
  misc_feature (24)..(24): n is a, c, g, or t
atgttatttatctctccttggttnacttccaaggaaactggaatg

SEQ ID NO: 951 - DNA, 45 bp, Homo sapiens
  misc_feature (22)..(22): n is a, c, g, or t
ttcaggaaaaaaccaaccaganctaacatcaacacagactttaag

SEQ ID NO: 952 - DNA, 46 bp, Homo sapiens
  misc_feature (20)..(21): n is a, c, g, or t
aggctgactttccagacaanntaagtgtgatttaacatctaaaaca

SEQ ID NO: 953 - DNA, 46 bp, Homo sapiens
  misc_feature (21)..(21): n is a, c, g, or t
gcccatagatgacaacctgantttctgtatgttaaagtagatgtaa

SEQ ID NO: 954 - DNA, 46 bp, Homo sapiens
  misc_feature (26)..(26): n is a, c, g, or t
caaggaaaaacataattctttcaaanggtgtgtatttggcaaagag

SEQ ID NO: 955 - DNA, 46 bp, Homo sapiens
  misc_feature (20)..(20): n is a, c, g, or t
tggcctcaagatccctttanattctttttttgtttgtttgtttgtt

SEQ ID NO: 956 - DNA, 46 bp, Homo sapiens
  misc_feature (24)..(24): n is a, c, g, or t
tctttgttcttttctgaatctagngaatccaaattgtccctctttt

SEQ ID NO: 957 - DNA, 46 bp, Homo sapiens
  misc_feature (23)..(23): n is a, c, g, or t
ggcattgattttgaagacatcanacacatgcagaatgaaaaatttt

SEQ ID NO: 958 - DNA, 46 bp, Homo sapiens
  misc_feature (24)..(24): n is a, c, g, or t
ctcatttttaaaggagtaggacanagttgtcacaggtttttgttgt

SEQ ID NO: 959 - DNA, 46 bp, Homo sapiens
  misc_feature (24)..(24): n is a, c, g, or t
gacatccaaaaaggatgttttctnggagagaatcattctgaatcca

SEQ ID NO: 960 - DNA, 46 bp, Homo sapiens
  misc_feature (25)..(25): n is a, c, g, or t
ccactggcaaattattttttttatnagatgagatgttgggaaaccc

SEQ ID NO: 961 - DNA, 46 bp, Homo sapiens
  misc_feature (23)..(23): n is a, c, g, or t
ggaaagggtggtctttaaatccntatgtttttctcatcaggttaca

SEQ ID NO: 962 - DNA, 46 bp, Homo sapiens
  misc_feature (24)..(24): n is a, c, g, or t
tggagactaaagagacataaatgntatgtttgttttgtggtggtct

SEQ ID NO: 963 - DNA, 46 bp, Homo sapiens
  misc_feature (24)..(24): n is a, c, g, or t
aacattccaattttgtcaccaatnccttcattaatcttggagacat

SEQ ID NO: 964 - DNA, 46 bp, Homo sapiens
  misc_feature (24)..(24): n is a, c, g, or t
gtaagcaaaattttcagctatttnattatgacttcctgggagataa

SEQ ID NO: 965 - DNA, 46 bp, Homo sapiens
  misc_feature (23)..(23): n is a, c, g, or t
cggctatatttttggtcatacantgttgtttgttttcctgtcaaaa

SEQ ID NO: 966 - DNA, 46 bp, Homo sapiens
  misc_feature (24)..(24): n is a, c, g, or t
ttcctgaatgaaaatggaaagttnaagtacagtgactatttcaagc

SEQ ID NO: 967 - DNA, 46 bp, Homo sapiens
  misc_feature (27)..(27): n is a, c, g, or t
gatctagtttatatctcttcaaatacnaaggcagatcttaagctgc

SEQ ID NO: 968 - DNA, 46 bp, Homo sapiens
  misc_feature (25)..(25): n is a, c, g, or t
atagactcaaaatcttcaattgttngaggttcaagcgtaaataagt

SEQ ID NO: 969 - DNA, 46 bp, Homo sapiens
  misc_feature (22)..(22): n is a, c, g, or t
ctcctagaagacagcaaatacngaaaaatctactcctttactctta

SEQ ID NO: 970 - DNA, 46 bp, Homo sapiens
  misc_feature (26)..(26): n is a, c, g, or t
cttaagagtaaaggagtagatttttnggtatttgctgtcttctagg

SEQ ID NO: 971 - DNA, 46 bp, Homo sapiens
  misc_feature (20)..(20): n is a, c, g, or t
tcctgcctacatcagaagangtttataagcctattttaaaggatac

SEQ ID NO: 972 - DNA, 46 bp, Homo sapiens
  misc_feature (24)..(24): n is a, c, g, or t
cctttcttaaaaccagatgatcancaaaaggaagtggttaacatgg

SEQ ID NO: 973 - DNA, 46 bp, Homo sapiens
  misc_feature (22)..(22): n is a, c, g, or t
aagttgggtcttttgtgtcaangagatcatctcttctagaaatatc

SEQ ID NO: 974 - DNA, 46 bp, Homo sapiens
  misc_feature (23)..(23): n is a, c, g, or t
gggaagacctttttatacagggntatcttgtttttgaccactttga

SEQ ID NO: 975 - DNA, 46 bp, Homo sapiens
  misc_feature (23)..(23): n is a, c, g, or t
ctggagttagatacaagtgtcantcattataatgctttgcatctac

SEQ ID NO: 976 - DNA, 46 bp, Homo sapiens
  misc_feature (23)..(23): n is a, c, g, or t
gataccctcacttcaagactaanattgaaggtatgtttgcaaaacg

SEQ ID NO: 977 - DNA, 46 bp, Homo sapiens
  misc_feature (25)..(25): n is a, c, g, or t
attgcttcattaaataaagtacctntgttgctataaaccagatgga

SEQ ID NO: 978 - DNA, 46 bp, Homo sapiens
  misc_feature (23)..(23): n is a, c, g, or t
ctaggaaatttgcttgtgattgnatttgtgagttactttggatcca

SEQ ID NO: 979 - DNA, 47 bp, Homo sapiens
  misc_feature (24)..(25): n is a, c, g, or t
tcccactatcattgattatttccnnggaacccataacaaattactta

SEQ ID NO: 980 - DNA, 47 bp, Homo sapiens
  misc_feature (25)..(25): n is a, c, g, or t
  misc_feature (29)..(29): n is a, c, g, or t
actcaaatccaagtgtaaaagtaanatgntttgctttcgttttgttt

SEQ ID NO: 981 - DNA, 46 bp, Homo sapiens
  misc_feature (23)..(23): n is a, c, g, or t
gataaaaaagcaaagaaagacgntttttggtttaaaaagaagccac

SEQ ID NO: 982 - DNA, 47 bp, Homo sapiens
  misc_feature (21)..(21): n is a, c, g, or t
ccagtcttccccaaaggaaangaagtccaaattaaagttttgaatat

SEQ ID NO: 983 - DNA, 47 bp, Homo sapiens
  misc_feature (26)..(26): n is a, c, g, or t
cataagaattcagttttggtgttaangatgttttcattctcggtgtt

SEQ ID NO: 984 - DNA, 47 bp, Homo sapiens
  misc_feature (22)..(22): n is a, c, g, or t
cctgttttatttgcagccattngttatctatgacatgaattccttaa

SEQ ID NO: 985 - DNA, 47 bp, Homo sapiens
  misc_feature (26)..(26): n is a, c, g, or t
tggtacaatactattaaccaaagtcngtgtgttgttcagaccttacc

SEQ ID NO: 986 - DNA, 47 bp, Homo sapiens
  misc_feature (28)..(28): n is a, c, g, or t
catgttttaataaagtttacgtatttgngttgggatgcattcagagc

SEQ ID NO: 987 - DNA, 47 bp, Homo sapiens
  misc_feature (26)..(26): n is a, c, g, or t
cacatacaaaatctttaaactcactntgaacactctgagaaaatgct

SEQ ID NO: 988 - DNA, 47 bp, Homo sapiens
  misc_feature (24)..(24): n is a, c, g, or t
catgatctttaaacgtttgtcttnattcttcatatttttgacctgcc

SEQ ID NO: 989 - DNA, 47 bp, Homo sapiens
  misc_feature (23)..(23): n is a, c, g, or t
tcgtttggctactttgattaaanaagaaagaagagataataattgca

SEQ ID NO: 990 - DNA, 47 bp, Homo sapiens
  misc_feature (24)..(24): n is a, c, g, or t
taaaagcaaacacttacagaattntgaagaggtatctgtttaacatt

SEQ ID NO: 991 - DNA, 47 bp, Homo sapiens
  misc_feature (24)..(24): n is a, c, g, or t
tgatgtctccaagattaatgaagnaattggtgacaaaattggaatgt

SEQ ID NO: 992 - DNA, 47 bp, Homo sapiens
  misc_feature (21)..(21): n is a, c, g, or t
gcatggtttcaaaagggtccnctgaaacagacaaattaaatatttct

SEQ ID NO: 993 - DNA, 47 bp, Homo sapiens
  misc_feature (27)..(27): n is a, c, g, or t
cataactaagcttttgttaacattttnccttctccattttgatcagg

SEQ ID NO: 994 - DNA, 47 bp, Homo sapiens
  misc_feature (27)..(27): n is a, c, g, or t
gttgtgtatgattctacatagaatatnaactcaatggaggtcagtga

SEQ ID NO: 995 - DNA, 47 bp, Homo sapiens
  misc_feature (6)..(6): n is a, c, g, or t
  misc_feature (23)..(23): n is a, c, g, or t
aaaacntatgacttgagtacaanaggattgttttaatccccattatt

SEQ ID NO: 996 - DNA, 47 bp, Homo sapiens
  misc_feature (25)..(25): n is a, c, g, or t
ttataaagacaatacagatctggtngagtttaaaactctcactgagg

SEQ ID NO: 997 - DNA, 47 bp, Homo sapiens
  misc_feature (25)..(25): n is a, c, g, or t
cacaatgttaggagggtatttttanatccctccagttaacaaataca

SEQ ID NO: 998 - DNA, 47 bp, Homo sapiens
  misc_feature (21)..(21): n is a, c, g, or t
agctgtaaccatttcacaganttgttgtgagaattaaatgaaataat

SEQ ID NO: 999 - DNA, 47 bp, Homo sapiens
  misc_feature (23)..(23): n is a, c, g, or t
tctccactcttgggttttttttnttttcttttcttttgctattttgc

SEQ ID NO: 1000 - DNA, 47 bp, Homo sapiens
  misc_feature (24)..(24): n is a, c, g, or t
aatcctagagacttacataaaccnatccaggaagttatcattgaatt

SEQ ID NO: 1001 - DNA, 47 bp, Homo sapiens
  misc_feature (23)..(23): n is a, c, g, or t
gaaaatggaagtgtcatggatgnagcaaacttagaatccttaaataa

SEQ ID NO: 1002 - DNA, 47 bp, Homo sapiens
  misc_feature (25)..(25): n is a, c, g, or t
tgaagaaaaaatatcaagagaaagntatcaatgcatcagaaaatgga

SEQ ID NO: 1003 - DNA, 47 bp, Homo sapiens
  misc_feature (28)..(28): n is a, c, g, or t
ctattatattttttcatactctgtgaanacaaatcagttgccggact

SEQ ID NO: 1004 - DNA, 47 bp, Homo sapiens
  misc_feature (22)..(22): n is a, c, g, or t
agtgtctccaattgtcctgttntaaaacaaaagactcttactaaact

SEQ ID NO: 1005 - DNA, 47 bp, Homo sapiens
  misc_feature (26)..(26): n is a, c, g, or t
tgatacttattctgtcattaattcantaaacttgtattgggtgcctg

SEQ ID NO: 1006 - DNA, 47 bp, Homo sapiens
  misc_feature (22)..(22): n is a, c, g, or t
ggatagcattaggagattcacntaatgttaaatgatgagttaatggg

SEQ ID NO: 1007 - DNA, 48 bp, Homo sapiens
  misc_feature (22)..(22): n is a, c, g, or t
ttaaatcgaggcagaaagatanagacattcaatgaattatattcaatg

SEQ ID NO: 1008 - DNA, 48 bp, Homo sapiens
  misc_feature (27)..(27): n is a, c, g, or t
atatagacatctgataatagaaaatgnggaagagagcattaacacaaa

SEQ ID NO: 1009 - DNA, 48 bp, Homo sapiens
  misc_feature (25)..(25): n is a, c, g, or t
tttacaattaacagcatattccaangaagaaagaaagcatatgatgtc

SEQ ID NO: 1010 - DNA, 48 bp, Homo sapiens
  misc_feature (27)..(27): n is a, c, g, or t
atgacatgttatatattttttgtaggngtcaaagaaatgctgatggat

SEQ ID NO: 1011 - DNA, 48 bp, Homo sapiens
  misc_feature (25)..(25): n is a, c, g, or t
ccaataatacactaattcctttctntcctacaacaagagtttatttcc

SEQ ID NO: 1012 - DNA, 48 bp, Homo sapiens
  misc_feature (24)..(24): n is a, c, g, or t
tcctttttttagtttcgatactcngattggcaggataaattgtttatg

SEQ ID NO: 1013 - DNA, 48 bp, Homo sapiens
  misc_feature (1)..(1): n is a, c, g, or t
  misc_feature (24)..(24): n is a, c, g, or t
ntcatgatgatagtatttggaganatgactgacaaatttgttgatact

SEQ ID NO: 1014 - DNA, 48 bp, Homo sapiens
  misc_feature (23)..(23): n is a, c, g, or t
gcagtgcaaaatatcgtttatcntacaggtaaagaatattttcagata

SEQ ID NO: 1015 - DNA, 48 bp, Homo sapiens
  misc_feature (24)..(24): n is a, c, g, or t
ttgattgagttgtgtatgattctncatagaatattaactcaatggagg

SEQ ID NO: 1016 - DNA, 48 bp, Homo sapiens
  misc_feature (24)..(24): n is a, c, g, or t
acatgttactctttcttgtttcangtaaaatatgcaatatacgttgtc

SEQ ID NO: 1017 - DNA, 48 bp, Homo sapiens
  misc_feature (25)..(25): n is a, c, g, or t
ttagacgtgatcctttttaaaaaangaagtggtgacatactgttaatc

SEQ ID NO: 1018 - DNA, 48 bp, Homo sapiens
  misc_feature (23)..(23): n is a, c, g, or t
actaatagaatccaaaggagganatcaagaagatcattagatttctag

SEQ ID NO: 1019 - DNA, 48 bp, Homo sapiens
  misc_feature (26)..(26): n is a, c, g, or t
ttaagatttgtgtttttctttttccncaaggaataaatgagagggaat

SEQ ID NO: 1020 - DNA, 48 bp, Homo sapiens
  misc_feature (23)..(23): n is a, c, g, or t
cagagtcttgaactctattaganctgtattgtccttataattgaatct

SEQ ID NO: 1021 - DNA, 48 bp, Homo sapiens
  misc_feature (23)..(23): n is a, c, g, or t
ggtagtaatgaatgcaatcagtnttagccaaaataaagaatttatgag

SEQ ID NO: 1022 - DNA, 48 bp, Homo sapiens
  misc_feature (25)..(25): n is a, c, g, or t
ttcttacaggtcaattcttttttcnttccttttgataatgtccatcat

SEQ ID NO: 1023 - DNA, 48 bp, Homo sapiens
  misc_feature (23)..(23): n is a, c, g, or t
cacttggtggtggtaacttattnacacctgtaggattaaaataaaaac

SEQ ID NO: 1024 - DNA, 48 bp, Homo sapiens
  misc_feature (27)..(27): n is a, c, g, or t
acacacttttactttaaaatttttctntctggcgtttttgtaatcata

SEQ ID NO: 1025 - DNA, 49 bp, Homo sapiens
  misc_feature (26)..(27): n is a, c, g, or t
ttttaagtaatttgttatgggttccnnggaaataatcaatgatagtggg

SEQ ID NO: 1026 - DNA, 49 bp, Homo sapiens
  misc_feature (24)..(24): n is a, c, g, or t
ctgaaaccaatacatgaattccantgaaattccaattttcactttaact

SEQ ID NO: 1027 - DNA, 49 bp, Homo sapiens
  misc_feature (26)..(26): n is a, c, g, or t
tctcaaaaaacaataacaacaacaanaaaaaaacccatcagaaaacagc

SEQ ID NO: 1028 - DNA, 49 bp, Homo sapiens
  misc_feature (26)..(26): n is a, c, g, or t
ccaatttcaaatgtaattcaggttangtggtacaagtaagtattagtgg

SEQ ID NO: 1029 - DNA, 49 bp, Homo sapiens
  misc_feature (24)..(24): n is a, c, g, or t
gaaacaagctagttaccttttatngttcagtttaaaaaagttcttcttc

SEQ ID NO: 1030 - DNA, 49 bp, Homo sapiens
  misc_feature (25)..(25): n is a, c, g, or t
cattgattgagttgtgtatgattcnacatagaatattaactcaatggag

SEQ ID NO: 1031 - DNA, 49 bp, Homo sapiens
  misc_feature (24)..(24): n is a, c, g, or t
acattgattgagttgtgtatgatnctacatagaatattaactcaatgga

SEQ ID NO: 1032 - DNA, 49 bp, Homo sapiens
  misc_feature (25)..(25): n is a, c, g, or t
ccaattcacaggttacatgaaaaanaatttactaagcttaactacatgt

SEQ ID NO: 1033 - DNA, 49 bp, Homo sapiens
  misc_feature (25)..(25): n is a, c, g, or t
ttgactgtctttttgaaaagttatntctacttacagaaaagtaaatgag

SEQ ID NO: 1034 - DNA, 49 bp, Homo sapiens
  misc_feature (26)..(26): n is a, c, g, or t
ggatacaacaacaaacaaataaacantaaaacaaaacccacattacagc

SEQ ID NO: 1035 - DNA, 49 bp, Homo sapiens
  misc_feature (29)..(29): n is a, c, g, or t
tgtttaattaatcaaattttatcactcantagagcatcacctgagatag

SEQ ID NO: 1036 - DNA, 49 bp, Homo sapiens
  misc_feature (24)..(24): n is a, c, g, or t
cgatgttgaattttctgatgaatngatattagtttctttagaatacctg

SEQ ID NO: 1037 - DNA, 49 bp, Homo sapiens
  misc_feature (22)..(22): n is a, c, g, or t
gttggttttattgacggaagcnttgaaattggtaacatttattttctat

SEQ ID NO: 1038 - DNA, 50 bp, Homo sapiens
  misc_feature (25)..(25): n is a, c, g, or t
ttagtggaaaataggctttttaatnatgaatatgatgacaatcagttata

SEQ ID NO: 1039 - DNA, 50 bp, Homo sapiens
  misc_feature (27)..(27): n is a, c, g, or t
cctaataacacccttattttatagatncaatgactgagtcaagaattaca

SEQ ID NO: 1040 - DNA, 50 bp, Homo sapiens
  misc_feature (25)..(25): n is a, c, g, or t
agtttcagaatgatactgtatgatnccatttatgtaaattgtgttacctg

SEQ ID NO: 1041 - DNA, 50 bp, Homo sapiens
  misc_feature (25)..(25): n is a, c, g, or t
agttcaaaccaacctgatttataancataagaacattctactactaattc

SEQ ID NO: 1042 - DNA, 50 bp, Homo sapiens
  misc_feature (26)..(26): n is a, c, g, or t
aatctatcaaaattaccctaaacatnctaagctcatctatttctttttaa

SEQ ID NO: 1043 - DNA, 50 bp, Homo sapiens
  misc_feature (28)..(28): n is a, c, g, or t
gttatattttggaaaaagtaaaagaacnccaagaatcaatggacatgaac

SEQ ID NO: 1044 - DNA, 50 bp, Homo sapiens
  misc_feature (23)..(23): n is a, c, g, or t
ccagtaacattgattgagttgtntatgattctacatagaatattaactca

SEQ ID NO: 1045 - DNA, 50 bp, Homo sapiens
  misc_feature (28)..(28): n is a, c, g, or t
gtttatcctacatctttaactaaaaatnatttggaagattctcttctgaa

SEQ ID NO: 1046 - DNA, 50 bp, Homo sapiens
  misc_feature (25)..(25): n is a, c, g, or t
gattttttggatccattctttctcncaataagtatgtggactactatttc

SEQ ID NO: 1047 - DNA, 50 bp, Homo sapiens
  misc_feature (23)..(23): n is a, c, g, or t
ctccaaagaaaataaagctcaantaaaataaaatatgatttgtgttcatg

SEQ ID NO: 1048 - DNA, 50 bp, Homo sapiens
  misc_feature (26)..(26): n is a, c, g, or t
agaatctatgtagaagataaacacanaatcttatattgtgaggtacctaa

SEQ ID NO: 1049 - DNA, 50 bp, Homo sapiens
  misc_feature (22)..(22): n is a, c, g, or t
caacagttgctgttctttgtcnactttatttacttgtttatctttaatga

SEQ ID NO: 1050 - DNA, 50 bp, Homo sapiens
  misc_feature (26)..(26): n is a, c, g, or t
tgttgagatactttactaataaactntgtagttggaaaatctacatttgc

SEQ ID NO: 1051 - DNA, 51 bp, Homo sapiens
  misc_feature (22)..(22): n is a, c, g, or t
aaattagtttcctctccatgcngagtctgaatatattataaaaataaaaga

SEQ ID NO: 1052 - DNA, 51 bp, Homo sapiens
  misc_feature (26)..(26): n is a, c, g, or t
gaaacagaagttttttgatatttccntttgaatattttggtatctgattgg

SEQ ID NO: 1053 - DNA, 51 bp, Homo sapiens
  misc_feature (26)..(26): n is a, c, g, or t
tttaaaccttttattataagtcttanataaaccatttttgttactctcttc

SEQ ID NO: 1054 - DNA, 51 bp, Homo sapiens
  misc_feature (30)..(30): n is a, c, g, or t
gataaatttgaaggaaatataacatttaangaagtcgtgttcaactatccc

SEQ ID NO: 1055 - DNA, 51 bp, Homo sapiens
  misc_feature (23)..(23): n is a, c, g, or t
catcatcaagtggagagaaatcntagtttaaactgcattataaattttata

SEQ ID NO: 1056 - DNA, 51 bp, Homo sapiens
  misc_feature (29)..(29): n is a, c, g, or t
gcattaataattacattatttttaggaantcttatcaaatatggtcctgga

SEQ ID NO: 1057 - DNA, 51 bp, Homo sapiens
  misc_feature (28)..(28): n is a, c, g, or t
agagaagttacaaattttttaagaaaanctgtaaaaaggatgaaagaaagt

SEQ ID NO: 1058 - DNA, 51 bp, Homo sapiens
  misc_feature (27)..(27): n is a, c, g, or t
gcttttaagatttgattttttggatcnattctttctctcaataagtatgtg

SEQ ID NO: 1059 - DNA, 51 bp, Homo sapiens
  misc_feature (27)..(27): n is a, c, g, or t
tgctaattaaataatacaactcctatncacccacttagttaaaattgattt

SEQ ID NO: 1060 - DNA, 51 bp, Homo sapiens
  misc_feature (22)..(22): n is a, c, g, or t
agaaaacagcattctttttgcnaaatatgaccaaattacttttatttataa

SEQ ID NO: 1061 - DNA, 52 bp, Homo sapiens
  misc_feature (26)..(26): n is a, c, g, or t
gtgatcataatgaggtttgttaaaangatagctatattcaaaatgtctatat

SEQ ID NO: 1062 - DNA, 52 bp, Homo sapiens
  misc_feature (24)..(24): n is a, c, g, or t
gagttgtcagtatgttatcactanaaaacaaagaaaaatgattaataaatga

SEQ ID NO: 1063 - DNA, 52 bp, Homo sapiens
  misc_feature (26)..(26): n is a, c, g, or t
gctcaatacatttcaatataacctcntatggctttatatcatttttgttttc

SEQ ID NO: 1064 - DNA, 52 bp, Homo sapiens
  misc_feature (27)..(27): n is a, c, g, or t
gatagatttttcttgtgtagtatttgnattctttcaaaagcaaattaacttc

SEQ ID NO: 1065 - DNA, 52 bp, Homo sapiens
  misc_feature (25)..(25): n is a, c, g, or t
gatgacaaatagacaagattgtttnactccttattctaaatagtaaaaaatc

SEQ ID NO: 1066 - DNA, 53 bp, Homo sapiens
  misc_feature (25)..(25): n is a, c, g, or t
cctgtagattcaggtaatacaaacnatatataatcatcaagtaatacaaacta

SEQ ID NO: 1067 - DNA, 53 bp, Homo sapiens
  misc_feature (26)..(26): n is a, c, g, or t
tgttgaattcctagaaaagttttatnggtagatgagtaaataaaatattgtaa

SEQ ID NO: 1068 - DNA, 54 bp, Homo sapiens
  misc_feature (24)..(24): n is a, c, g, or t
ttgttttaactgttgttgaggaanctaataaataattaaattgtatagaaagtc

SEQ ID NO: 1069 - DNA, 54 bp, Homo sapiens
  misc_feature (30)..(30): n is a, c, g, or t
cataaagattcattgttaatataaaagtanaaaattgcaacctatgaattaaga

SEQ ID NO: 1070 - DNA, 56 bp, Homo sapiens
  misc_feature (28)..(28): n is a, c, g, or t
gacaaatattgtttcctatatatatgtntatgttttatatatgtatgtatactcat

SEQ ID NO: 1071 - DNA, 57 bp, Homo sapiens
  misc_feature (26)..(26): n is a, c, g, or t
cacatcctatcagaacaatattattnttattattttttattacactttaagttttag

SEQ ID NO: 1072 - DNA, 35 bp, Homo sapiens
  misc_feature (18)..(18): n is a, c, g, or t
cacacgtgcacaggaagnctgtcgggggtgccatc

SEQ ID NO: 1073 - DNA, 35 bp, Homo sapiens
  misc_feature (18)..(18): n is a, c, g, or t
ctggctgggcctctggcnagtggcagcatcccctt

SEQ ID NO: 1074 - DNA, 35 bp, Homo sapiens
  misc_feature (18)..(18): n is a, c, g, or t
gagtagaggaacacgcgnaccaatgtctgcggacg

SEQ ID NO: 1075 - DNA, 35 bp, Homo sapiens
  misc_feature (18)..(18): n is a, c, g, or t
gcggggttgcgacccagngagtagaggaacacgcg

SEQ ID NO: 1076 - DNA, 35 bp, Homo sapiens
  misc_feature (18)..(18): n is a, c, g, or t
ggatgctgccactggccngaggcccagccaggaca

SEQ ID NO: 1077 - DNA, 35 bp, Homo sapiens
  misc_feature (18)..(18): n is a, c, g, or t
ggggatgctgccactggncagaggcccagccagga

SEQ ID NO: 1078 - DNA, 35 bp, Homo sapiens
  misc_feature (18)..(18): n is a, c, g, or t
tgatggcacccccgacanccttcctgtgcacgtgt

SEQ ID NO: 1079 - DNA, 35 bp, Homo sapiens
  misc_feature (18)..(18): n is a, c, g, or t
tggccaaggtgcaccctnagcctgggacctgggac

SEQ ID NO: 1080 - DNA, 35 bp, Homo sapiens
  misc_feature (18)..(18): n is a, c, g, or t
aaaggcggggtcagggcngggttcgcggaagaggc

SEQ ID NO: 1081 - DNA, 35 bp, Homo sapiens
  misc_feature (18)..(18): n is a, c, g, or t
ctgatcgtgtcagcctcntgccccaggcctcatct

SEQ ID NO: 1082 - DNA, 35 bp, Homo sapiens
  misc_feature (18)..(18): n is a, c, g, or t
ctgtcccaggtcccaggntcagggtgcaccttggc

SEQ ID NO: 1083 - DNA, 35 bp, Homo sapiens
  misc_feature (18)..(18): n is a, c, g, or t
ggaaaggcggggtcaggncggggttcgcggaagag

SEQ ID NO: 1084 - DNA, 35 bp, Homo sapiens
  misc_feature (18)..(18): n is a, c, g, or t
tgtgcaagccactgtgcncgcggcagtccttcacc

SEQ ID NO: 1085 - DNA, 35 bp, Homo sapiens
  misc_feature (12)..(12): n is a, c, g, or t
  misc_feature (18)..(18): n is a, c, g, or t
agcgcatccccncaggcnctgtgctagagatggcc

SEQ ID NO: 1086 - DNA, 35 bp, Homo sapiens
  misc_feature (18)..(18): n is a, c, g, or t
  misc_feature (27)..(27): n is a, c, g, or t
gcgaggtgctggggcagngcatccccncaggcgct

SEQ ID NO: 1087 - DNA, 36 bp, Homo sapiens
  misc_feature (18)..(18): n is a, c, g, or t
ctcgggaacaaggcgggnttgcgacccagagagtag

SEQ ID NO: 1088 - DNA, 36 bp, Homo sapiens
  misc_feature (19)..(19): n is a, c, g, or t
taccacatggccaaggtgnaccctgagcctgggacc

SEQ ID NO: 1089 - DNA, 36 bp, Homo sapiens
  misc_feature (19)..(19): n is a, c, g, or t
taggagtgacttgagcccngcagagatcaggagcag

SEQ ID NO: 1090 - DNA, 36 bp, Homo sapiens
  misc_feature (19)..(19): n is a, c, g, or t
tcaaactgggtgcttcctntccctgcacgggagcac

SEQ ID NO: 1091 - DNA, 36 bp, Homo sapiens
  misc_feature (18)..(18): n is a, c, g, or t
tcggtgagaccattgccngctgggaggtctttctct

SEQ ID NO: 1092 - DNA, 36 bp, Homo sapiens
  misc_feature (18)..(18): n is a, c, g, or t
gcaggcactccctgaaangctgaagctctactcaca

SEQ ID NO: 1093 - DNA, 36 bp, Homo sapiens
  misc_feature (19)..(19): n is a, c, g, or t
  misc_feature (28)..(28): n is a, c, g, or t
acattgacgtgtcccccanacacgtggnctttgcca

SEQ ID NO: 1094 - DNA, 36 bp, Homo sapiens
  misc_feature (19)..(19): n is a, c, g, or t
  misc_feature (23)..(23): n is a, c, g, or t
cagctccctaggagtgacntganccccgcagagatc

SEQ ID NO: 1095 - DNA, 37 bp, Homo sapiens
  misc_feature (19)..(19): n is a, c, g, or t
agaggagcattgaggaccntgttcaagaggaagcccg

SEQ ID NO: 1096 - DNA, 37 bp, Homo sapiens
  misc_feature (20)..(20): n is a, c, g, or t
cggaagtgtatcggtgagancattgcccgctgggagg

SEQ ID NO: 1097 - DNA, 37 bp, Homo sapiens
  misc_feature (20)..(20): n is a, c, g, or t
ctccctaggagtgacttganccccgcagagatcagga

SEQ ID NO: 1098 - DNA, 37 bp, Homo sapiens
  misc_feature (19)..(19): n is a, c, g, or t
ggccttgttccaggagtgngtgttgggtcctctgctt

SEQ ID NO: 1099 - DNA, 37 bp, Homo sapiens
  misc_feature (20)..(20): n is a, c, g, or t
acttctaccacatggccaangtgcaccctgagcctgg

SEQ ID NO: 1100 - DNA, 37 bp, Homo sapiens
  misc_feature (20)..(20): n is a, c, g, or t
cagagagtagaggaacacgngcaccaatgtctgcgga

SEQ ID NO: 1101 - DNA, 37 bp, Homo sapiens
  misc_feature (19)..(19): n is a, c, g, or t
ccttgttccaggagtgggngttgggtcctctgcttcc

SEQ ID NO: 1102 - DNA, 37 bp, Homo sapiens
  misc_feature (20)..(20): n is a, c, g, or t
gacccagagagtagaggaanacgcgcaccaatgtctg

SEQ ID NO: 1103 - DNA, 37 bp, Homo sapiens
  misc_feature (20)..(20): n is a, c, g, or t
ggaagaggcgggtataagantggggggaagatgcggg

SEQ ID NO: 1104 - DNA, 37 bp, Homo sapiens
  misc_feature (20)..(20): n is a, c, g, or t
cgtatgtccacctgaggaanaagatgccaagcttgcc

SEQ ID NO: 1105 - DNA, 37 bp, Homo sapiens
  misc_feature (18)..(18): n is a, c, g, or t
gctgcccactcgcatggnctccactagtggcagtttc

SEQ ID NO: 1106 - DNA, 37 bp, Homo sapiens
  misc_feature (18)..(18): n is a, c, g, or t
tccccagcacttcctgantgagaaggggcagtttaag

SEQ ID NO: 1107 - DNA, 37 bp, Homo sapiens
  misc_feature (20)..(20): n is a, c, g, or t
  misc_feature (26)..(26): n is a, c, g, or t
tgctcatcaagttcgtgaangacacnaaggccccaga

SEQ ID NO: 1108 - DNA, 38 bp, Homo sapiens
  misc_feature (20)..(20): n is a, c, g, or t
ccccagtgtcatggacatgntgctggttggtgtcgatt

SEQ ID NO: 1109 - DNA, 38 bp, Homo sapiens
  misc_feature (18)..(18): n is a, c, g, or t
cctccttctgcccgtatntccacctgaggaaaaagatg

SEQ ID NO: 1110 - DNA, 38 bp, Homo sapiens
  misc_feature (21)..(21): n is a, c, g, or t
ggaagtgtatcggtgagaccnttgcccgctgggaggtc

SEQ ID NO: 1111 - DNA, 38 bp, Homo sapiens
  misc_feature (21)..(21): n is a, c, g, or t
gtgtatcggtgagaccattgnccgctgggaggtctttc

SEQ ID NO: 1112 - DNA, 38 bp, Homo sapiens
  misc_feature (20)..(20): n is a, c, g, or t
tcaccagtcactgctgtaantgacgacttcaagcaggg

SEQ ID NO: 1113 - DNA, 38 bp, Homo sapiens
  misc_feature (21)..(21): n is a, c, g, or t
caagctccactacttcaatgnacggggcagaatggagt

SEQ ID NO: 1114 - DNA, 38 bp, Homo sapiens
  misc_feature (21)..(21): n is a, c, g, or t
ccaagctccactacttcaatncacggggcagaatggag

SEQ ID NO: 1115 - DNA, 38 bp, Homo sapiens
  misc_feature (21)..(21): n is a, c, g, or t
cccagagagtagaggaacacncgcaccaatgtctgcgg

SEQ ID NO: 1116 - DNA, 38 bp, Homo sapiens
  misc_feature (20)..(20): n is a, c, g, or t
gagggaagctggagataagnctggagtcaagctcctcg

SEQ ID NO: 1117 - DNA, 38 bp, Homo sapiens
  misc_feature (20)..(20): n is a, c, g, or t
gccccttctcattcaggaantgctggggattgaagtcc

SEQ ID NO: 1118 - DNA, 38 bp, Homo sapiens
  misc_feature (20)..(20): n is a, c, g, or t
gcgggtataagaatgggggnaagatgcgggaaaggaag

SEQ ID NO: 1119 - DNA, 38 bp, Homo sapiens
  misc_feature (19)..(19): n is a, c, g, or t
tccttctgcccgtatgtcnacctgaggaaaaagatgcc

SEQ ID NO: 1120 - DNA, 38 bp, Homo sapiens
  misc_feature (16)..(16): n is a, c, g, or t
  misc_feature (20)..(21): n is a, c, g, or t
tgcttgaagtcgtcanttanngcagtgactggtgatcc

SEQ ID NO: 1121 - DNA, 39 bp, Homo sapiens
  misc_feature (18)..(18): n is a, c, g, or t
aggctggtggggagaagntcaatgtatctctggacctcg

SEQ ID NO: 1122 - DNA, 39 bp, Homo sapiens
  misc_feature (19)..(20): n is a, c, g, or t
  misc_feature (22)..(22): n is a, c, g, or t
ctggtggggagaaggtcanngnatctctggacctcgtgc

SEQ ID NO: 1123 - DNA, 39 bp, Homo sapiens
  misc_feature (21)..(21): n is a, c, g, or t
agaaactgtgagtagagcttnagcatttcagggagtgcc

SEQ ID NO: 1124 - DNA, 39 bp, Homo sapiens
  misc_feature (20)..(20): n is a, c, g, or t
ccagtgaagtggcctaaccnggagaactttgatccagct

SEQ ID NO: 1125 - DNA, 39 bp, Homo sapiens
  misc_feature (21)..(21): n is a, c, g, or t
cgggtataagaatggggggangatgcgggaaaggaaggg

SEQ ID NO: 1126 - DNA, 39 bp, Homo sapiens
  misc_feature (21)..(21): n is a, c, g, or t
gcaggttgctcatcaagttcntgaatgacacgaaggccc

SEQ ID NO: 1127 - DNA, 39 bp, Homo sapiens
  misc_feature (18)..(18): n is a, c, g, or t
ttcgcggaagaggcgggnataagaatggggggaagatgc

SEQ ID NO: 1128 - DNA, 39 bp, Homo sapiens
  misc_feature (19)..(19): n is a, c, g, or t
actggagtcaagctcctcnacgtagtagagaagttccac

SEQ ID NO: 1129 - DNA, 39 bp, Homo sapiens
  misc_feature (20)..(20): n is a, c, g, or t
cagtaccccagtgtcatggncatgatgctggttggtgtc

SEQ ID NO: 1130 - DNA, 39 bp, Homo sapiens
  misc_feature (19)..(19): n is a, c, g, or t
cgtcgaggagcttgactcnagtcttatctccagcttccc

SEQ ID NO: 1131 - DNA, 39 bp, Homo sapiens
  misc_feature (21)..(21): n is a, c, g, or t
tgagctctctgaaagttgtcnccctggaatagggtcctg

SEQ ID NO: 1132 - DNA, 39 bp, Homo sapiens
  misc_feature (21)..(21): n is a, c, g, or t
  misc_feature (28)..(28): n is a, c, g, or t
aacacggagttctacttgaanaacctgntgatgaccacg

SEQ ID NO: 1133 - DNA, 39 bp, Homo sapiens
  misc_feature (20)..(20): n is a, c, g, or t
cttcagcatttcagggagtncctgcaggtattctggttt

SEQ ID NO: 1134 - DNA, 39 bp, Homo sapiens
  misc_feature (18)..(18): n is a, c, g, or t
  misc_feature (24)..(24): n is a, c, g, or t
tgccagtctggggccttngtgtcnttcacgaacttgatg

SEQ ID NO: 1135 - DNA, 40 bp, Homo sapiens
  misc_feature (19)..(19): n is a, c, g, or t
  misc_feature (30)..(30): n is a, c, g, or t
attctaccctgcaggaccntattccagggngacaactttc

SEQ ID NO: 1136 - DNA, 40 bp, Homo sapiens
  misc_feature (2)..(2): n is a, c, g, or t
  misc_feature (20)..(20): n is a, c, g, or t
cncccactcctggaacaagncctggtccatgaaagatgag

SEQ ID NO: 1137 - DNA, 40 bp, Homo sapiens
  misc_feature (18)..(18): n is a, c, g, or t
  misc_feature (39)..(39): n is a, c, g, or t
ctttgagcaccagcagcnatttctgaaacacaatgaggng

SEQ ID NO: 1138 - DNA, 40 bp, Homo sapiens
  misc_feature (19)..(20): n is a, c, g, or t
  misc_feature (24)..(24): n is a, c, g, or t
tggatcaccagtcactgcnntaantgacgacttcaagcag

SEQ ID NO: 1139 - DNA, 40 bp, Homo sapiens
  misc_feature (22)..(22): n is a, c, g, or t
agatttgggtgaaatgatcctncttctgcccgtatgtcca

SEQ ID NO: 1140 - DNA, 40 bp, Homo sapiens
  misc_feature (20)..(20): n is a, c, g, or t
cccagcacttcctgaatganaaggggcagtttaagaagag

SEQ ID NO: 1141 - DNA, 40 bp, Homo sapiens
  misc_feature (22)..(22): n is a, c, g, or t
ctttttcctcaggtggacatangggcagaaggaggatcat

SEQ ID NO: 1142 - DNA, 40 bp, Homo sapiens
  misc_feature (21)..(21): n is a, c, g, or t
gaacttctctactacgtcgangagcttgactccagtctta

SEQ ID NO: 1143 - DNA, 41 bp, Homo sapiens
  misc_feature (21)..(21): n is a, c, g, or t
agagagtacggaaccacatcntgcacttggaggaacattta

SEQ ID NO: 1144 - DNA, 41 bp, Homo sapiens
  misc_feature (21)..(21): n is a, c, g, or t
  misc_feature (33)..(33): n is a, c, g, or t
ctacagcatggatgtgatcantagcacatcatntggagtga

SEQ ID NO: 1145 - DNA, 41 bp, Homo sapiens
  misc_feature (19)..(19): n is a, c, g, or t
  misc_feature (34)..(34): n is a, c, g, or t
  misc_feature (40)..(40): n is a, c, g, or t
gctcctttgcaggttgctnatcaagttcgtgaangacacna

SEQ ID NO: 1146 - DNA, 41 bp, Homo sapiens
  misc_feature (22)..(22): n is a, c, g, or t
  misc_feature (24)..(24): n is a, c, g, or t
agcacatcatttggagtgaacntngactctctcaacaatcc

SEQ ID NO: 1147 - DNA, 42 bp, Homo sapiens
  misc_feature (20)..(20): n is a, c, g, or t
ctgctatgtagccgatactnatagagccaataaagaatccta

SEQ ID NO: 1148 - DNA, 42 bp, Homo sapiens
  misc_feature (21)..(21): n is a, c, g, or t
caatgaagaggttcaacgtgntcatcaccaggtttttcaagt

SEQ ID NO: 1149 - DNA, 42 bp, Homo sapiens
  misc_feature (3)..(3): n is a, c, g, or t
  misc_feature (22)..(22): n is a, c, g, or t
  misc_feature (24)..(24): n is a, c, g, or t
gcnatttctgaaacacaatgangngaggattgacaccaacca

SEQ ID NO: 1150 - DNA, 42 bp, Homo sapiens
  misc_feature (23)..(23): n is a, c, g, or t
  misc_feature (25)..(25): n is a, c, g, or t
tgtaggattctttattggctctntnagtatcggctacatagc

SEQ ID NO: 1151 - DNA, 42 bp, Homo sapiens
  misc_feature (14)..(14): n is a, c, g, or t
  misc_feature (22)..(22): n is a, c, g, or t
ttgccttgatcaangagaaaanaaaaaatcgctacttccctg

SEQ ID NO: 1152 - DNA, 43 bp, Homo sapiens
  misc_feature (2)..(2): n is a, c, g, or t
  misc_feature (23)..(23): n is a, c, g, or t
cnatttctgaaacacaatgaggngaggattgacaccaaccaga

SEQ ID NO: 1153 - DNA, 43 bp, Homo sapiens
  misc_feature (15)..(15): n is a, c, g, or t
  misc_feature (22)..(22): n is a, c, g, or t
cttgccttgatcaangagaaantaaaaaatcgctacttccctg

SEQ ID NO: 1154 - DNA, 44 bp, Homo sapiens
  misc_feature (20)..(20): n is a, c, g, or t
ccaagcttgccttgatcaangagaaaataaaaaatcgctacttc

SEQ ID NO: 1155 - DNA, 44 bp, Homo sapiens
  misc_feature (21)..(21): n is a, c, g, or t
ggaaagcacaagtacgaagtntgttttctctatttctgagttca

SEQ ID NO: 1156 - DNA, 44 bp, Homo sapiens
  misc_feature (23)..(23): n is a, c, g, or t
  misc_feature (37)..(37): n is a, c, g, or t
gtcatcagtgaatgtaggattcnttattggctctatnagtatcg

SEQ ID NO: 1157 - DNA, 45 bp, Homo sapiens
  misc_feature (26)..(26): n is a, c, g, or t
cctatgtttgttattttcaggaaaanggatttgtgtgggagaggg

SEQ ID NO: 1158 - DNA, 46 bp, Homo sapiens
  misc_feature (22)..(22): n is a, c, g, or t
gaaagcacaagtacgaagtttnttttctctatttctgagttcatcc

SEQ ID NO: 1159 - DNA, 46 bp, Homo sapiens
  misc_feature (24)..(24): n is a, c, g, or t
gtacgaagtttgttttctctattnctgagttcatccaatggttttt

SEQ ID NO: 1160 - DNA, 46 bp, Homo sapiens
  misc_feature (24)..(24): n is a, c, g, or t
  misc_feature (46)..(46): n is a, c, g, or t
tgtggagtgtgattttcttttttnacatatttgtatgcagtagagn

SEQ ID NO: 1161 - DNA, 48 bp, Homo sapiens
  misc_feature (25)..(25): n is a, c, g, or t
gtacgaagtttgttttctctatttntgagttcatccaatggttttttt

SEQ ID NO: 1162 - DNA, 54 bp, Homo sapiens
  misc_feature (30)..(30): n is a, c, g, or t
acccaaaatttaagtttaaaaaaaatatanatataagtaaacaaaggagggaag

SEQ ID NO: 1163 - DNA, 54 bp, Homo sapiens
  misc_feature (29)..(29): n is a, c, g, or t
tgacccaaaatttaagtttaaaaaaaatntatatataagtaaacaaaggaggga

SEQ ID NO: 1164 - DNA, 54 bp, Homo sapiens
  misc_feature (30)..(30): n is a, c, g, or t
gacccaaaatttaagtttaaaaaaaatatntatataagtaaacaaaggagggaa

SEQ ID NO: 1165 - DNA, 55 bp, Homo sapiens
  misc_feature (22)..(22): n is a, c, g, or t
cttagtggtgtcaagttgaccnaaaatttaagtttaaaaaaaatatatatataag

SEQ ID NO: 1166 - DNA, 55 bp, Homo sapiens
  misc_feature (23)..(23): n is a, c, g, or t
agcaaaatatcacatacaccccnaaaatatgtacaaatattatatatcaataaat

SEQ ID NO: 1167 - DNA, 35 bp, Homo sapiens
  misc_feature (20)..(20): n is a, c, g, or t
cggatttgtgtgggagaggnctggcccgcatggag

SEQ ID NO: 1168 - DNA, 35 bp, Homo sapiens
  misc_feature (20)..(20): n is a, c, g, or t
ggatttgtgtgggagagggnctggcccgcatggag

SEQ ID NO: 1169 - DNA, 35 bp, Homo sapiens
  misc_feature (17)..(17): n is a, c, g, or t
gccagcctgctaccccnggatccagcacccatttg

SEQ ID NO: 1170 - DNA, 35 bp, Homo sapiens
  misc_feature (17)..(17): n is a, c, g, or t
ccagcctgctacccccnggatccagcacccatttg

SEQ ID NO: 1171 - DNA, 35 bp, Homo sapiens
  misc_feature (17)..(17): n is a, c, g, or t
ctcgagtgcaggcaganttggatcaggtcgtgggg

SEQ ID NO: 1172 - DNA, 32 bp, Homo sapiens
  misc_feature (18)..(18): n is a, c, g, or t
tgaagttcctccgcaggngcgtggacgccgag

SEQ ID NO: 1173 - DNA, 32 bp, Homo sapiens
  misc_feature (18)..(18): n is a, c, g, or t
gaagttcctccgcaggtngcgtggacgccgag

SEQ ID NO: 1174 - DNA, 31 bp, Homo sapiens
  misc_feature (18)..(18): n is a, c, g, or t
ctgaagttcctccgcagnggcgtggacgccg

SEQ ID NO: 1175 - DNA, 31 bp, Homo sapiens
  misc_feature (18)..(18): n is a, c, g, or t
tgaagttcctccgcaggnggcgtggacgccg

SEQ ID NO: 1176 - DNA, 34 bp, Homo sapiens
  misc_feature (18)..(18): n is a, c, g, or t
aagttcctccgcaggtgngtggacgccgagacct

SEQ ID NO: 1177 - DNA, 33 bp, Homo sapiens
  misc_feature (17)..(17): n is a, c, g, or t
gttcctccgcaggtggngtggacgccgagacct

SEQ ID NO: 1178 - DNA, 32 bp, Homo sapiens
  misc_feature (16)..(16): n is a, c, g, or t
tcctccgcaggtggcnggacgccgagacctct

SEQ ID NO: 1179 - DNA, 31 bp, Homo sapiens
  misc_feature (15)..(15): n is a, c, g, or t
ctccgcaggtggcgnggacgccgagacctct

SEQ ID NO: 1180 - DNA, 35 bp, Homo sapiens
  misc_feature (17)..(17): n is a, c, g, or t
ggtgagctctgtgggcncaggacgcatggtagatg

SEQ ID NO: 1181 - DNA, 41 bp, Homo sapiens
  misc_feature (22)..(22): n is a, c, g, or t
cttgtggaggagttgagaaaancaagggtgggtgactctac

SEQ ID NO: 1182 - DNA, 41 bp, Homo sapiens
  misc_feature (22)..(22): n is a, c, g, or t
ttgtggaggagttgagaaaaancaagggtgggtgactctac

SEQ ID NO: 1183 - DNA, 40 bp, Homo sapiens
  misc_feature (20)..(20): n is a, c, g, or t
caggtgaccattgatggcanaactacattgtcgatgctgg

SEQ ID NO: 1184 - DNA, 38 bp, Homo sapiens
  misc_feature (18)..(18): n is a, c, g, or t
cagggcctgaaacggttntaacctctacctgactgaca

SEQ ID NO: 1185 - DNA, 39 bp, Homo sapiens
  misc_feature (19)..(19): n is a, c, g, or t
cagggcctgaaacggtttntaacctctacctgactgaca

SEQ ID NO: 1186 - DNA, 39 bp, Homo sapiens
  misc_feature (21)..(21): n is a, c, g, or t
gtatcctgatgtgcagactcnttggatcaggtcgtgggg

SEQ ID NO: 1187 - DNA, 39 bp, Homo sapiens
  misc_feature (21)..(21): n is a, c, g, or t
tttgtgcctgtcactattccnctgccaacacctctgtct

SEQ ID NO: 1188 - DNA, 38 bp, Homo sapiens
  misc_feature (20)..(20): n is a, c, g, or t
cactattcctcatgccaccnctgccaacacctctgtct

SEQ ID NO: 1189 - DNA, 43 bp, Homo sapiens
  misc_feature (23)..(23): n is a, c, g, or t
atgattttttcagtgggcaaaanaagatgcagctttttctctt

SEQ ID NO: 1190 - DNA, 40 bp, Homo sapiens
  misc_feature (20)..(20): n is a, c, g, or t
gcattggcgaagaactttcnaagatgcagctttttctctt

SEQ ID NO: 1191 - DNA, 40 bp, Homo sapiens
  misc_feature (18)..(18): n is a, c, g, or t
gccttccctaacccaggnaagatgacatcaaactgtcaga

SEQ ID NO: 1192 - DNA, 42 bp, Homo sapiens
  misc_feature (20)..(20): n is a, c, g, or t
gccttccctaacccaggatnaagatgacatcaaactgtcaga

SEQ ID NO: 1193 - DNA, 39 bp, Homo sapiens
  misc_feature (19)..(19): n is a, c, g, or t
gagatggtctctagccccntttgatttggggcacttaca

SEQ ID NO: 1194 - DNA, 38 bp, Homo sapiens
  misc_feature (18)..(18): n is a, c, g, or t
atggtctctagccccctntttgatttggggcacttaca

SEQ ID NO: 1195 - DNA, 38 bp, Homo sapiens
  misc_feature (17)..(17): n is a, c, g, or t
gcaacctccgcctctcngattcaagcaattgtcatgcc

SEQ ID NO: 1196 - DNA, 48 bp, Homo sapiens
  misc_feature (25)..(25): n is a, c, g, or t
tacccttaccttattttgaagaaancctagacatcaaatcatttcacc

SEQ ID NO: 1197 - DNA, 48 bp, Homo sapiens
  misc_feature (25)..(25): n is a, c, g, or t
acccttaccttattttgaagaaaancctagacatcaaatcatttcacc

SEQ ID NO: 1198 - DNA, 47 bp, Homo sapiens
  misc_feature (23)..(23): n is a, c, g, or t
tggtatctagaccaaatcagaanaacagtacattccaaatgaagaat

SEQ ID NO: 1199 - DNA, 47 bp, Homo sapiens
  misc_feature (28)..(28): n is a, c, g, or t
ttttcaaaaatatagatgcaaaaaaaangagctgtggatgcatgttt

SEQ ID NO: 1200 - DNA, 47 bp, Homo sapiens
  misc_feature (28)..(28): n is a, c, g, or t
tttcaaaaatatagatgcaaaaaaaaangagctgtggatgcatgttt

SEQ ID NO: 1201 - DNA, 45 bp, Homo sapiens
  misc_feature (22)..(22): n is a, c, g, or t
ttcaagacaactgtccttagtngagaaaatgtccagatttctcat

SEQ ID NO: 1202 - DNA, 45 bp, Homo sapiens
  misc_feature (22)..(22): n is a, c, g, or t
tcaagacaactgtccttagtgngagaaaatgtccagatttctcat

SEQ ID NO: 1203 - DNA, 47 bp, Homo sapiens
  misc_feature (26)..(26): n is a, c, g, or t
gtttcaggtaaaatatgcaatatacnttgtcttgagaaggttgatgc

SEQ ID NO: 1204 - DNA, 35 bp, Homo sapiens
  misc_feature (20)..(20): n is a, c, g, or t
ctcctgctcatgatcctacntccggatgtgcagcg

SEQ ID NO: 1205 - DNA, 31 bp, Homo sapiens
  misc_feature (16)..(16): n is a, c, g, or t
tgggctgcacgctacncaccaggccccctgc

SEQ ID NO: 1206 - DNA, 36 bp, Homo sapiens
  misc_feature (18)..(18): n is a, c, g, or t
acatccggatgtgcagcntgagcccatctgggaaac

SEQ ID NO: 1207 - DNA, 31 bp, Homo sapiens
  misc_feature (18)..(18): n is a, c, g, or t
ctgaccctccctctgcanttgcggcgccgct

SEQ ID NO: 1208 - DNA, 39 bp, Homo sapiens
  misc_feature (21)..(21): n is a, c, g, or t
gcttcaatgatgagaacctgngcatagtggtggctgacc

SEQ ID NO: 1209 - DNA, 31 bp, Homo sapiens
  misc_feature (16)..(16): n is a, c, g, or t
gcaggttgcccagccngggcagtggcagggg

SEQ ID NO: 1210 - DNA, 36 bp, Homo sapiens
  misc_feature (19)..(19): n is a, c, g, or t
cttctgcccatcacccacnggagtggttggcgaagg

SEQ ID NO: 1211 - DNA, 36 bp, Homo sapiens; identical to SEQ ID NO: 1210
  misc_feature (19)..(19): n is a, c, g, or t

SEQ ID NO: 1212 - DNA, 34 bp, Homo sapiens
  misc_feature (19)..(19): n is a, c, g, or t
ccgaaacccaggatctggntgatgggcacaggcg

SEQ ID NO: 1213 - DNA, 37 bp, Homo sapiens
  misc_feature (18)..(18): n is a, c, g, or t
gctcatagggggatgggntcaccaggaaagcaaagac

SEQ ID NO: 1214 - DNA, 36 bp, Homo sapiens
  misc_feature (18)..(18): n is a, c, g, or t
agctgctaactgagcacngatgacctgggacccagc

SEQ ID NO: 1215 - DNA, 36 bp, Homo sapiens
  misc_feature (18)..(18): n is a, c, g, or t
gctgctaactgagcacangatgacctgggacccagc

SEQ ID NO: 1216 - DNA, 33 bp, Homo sapiens
  misc_feature (17)..(17): n is a, c, g, or t
gaagtcgctggagcagnggtgaccgaggaggcc

SEQ ID NO: 1217 - DNA, 33 bp, Homo sapiens
  misc_feature (17)..(17): n is a, c, g, or t
aagtcgctggagcagtnggtgaccgaggaggcc

SEQ ID NO: 1218 - DNA, 34 bp, Homo sapiens
  misc_feature (18)..(18): n is a, c, g, or t
cttcctggcagagatggnggtgagagtggctgcc

SEQ ID NO: 1219 - DNA, 34 bp, Homo sapiens
  misc_feature (18)..(18): n is a, c, g, or t
cctggcagagatggaganggtgagagtggctgcc

SEQ ID NO: 1220 - DNA, 34 bp, Homo sapiens
  misc_feature (16)..(16): n is a, c, g, or t
cgggctgggcaacctnctgcatgtggacttccag

SEQ ID NO: 1221 - DNA, 35 bp, Homo sapiens
  misc_feature (17)..(17): n is a, c, g, or t
cgggctgggcaaccttnctgcatgtggacttccag

SEQ ID NO: 1222 - DNA, 34 bp, Homo sapiens
  misc_feature (17)..(17): n is a, c, g, or t
agctggatgagctgctnagcacaggatgacctgg

SEQ ID NO: 1223 - DNA, 36 bp, Homo sapiens
  misc_feature (19)..(19): n is a, c, g, or t
ctggatgagctgctaactnagcacaggatgacctgg

SEQ ID NO: 1224 - DNA, 32 bp, Homo sapiens
  misc_feature (15)..(15): n is a, c, g, or t
agcccagcccccccnagacctgactgaggcct

SEQ ID NO: 1225 - DNA, 32 bp, Homo sapiens
  misc_feature (15)..(15): n is a, c, g, or t
gcccagccccccccnagacctgactgaggcct

SEQ ID NO: 1226 - DNA, 32 bp, Homo sapiens
  misc_feature (16)..(16): n is a, c, g, or t
gcccccccgagacctnaggccttcctggcaga

SEQ ID NO: 1227 - DNA, 33 bp, Homo sapiens
  misc_feature (17)..(17): n is a, c, g, or t
cccccgagacctgactnaggccttcctggcaga

SEQ ID NO: 1228 - DNA, 48 bp, Homo sapiens
  misc_feature (22)..(22): n is a, c, g, or t
gcttcctgatgaaaatggagangtaaaatgtaaacaaaagcttagtta

SEQ ID NO: 1229 - DNA, 48 bp, Homo sapiens
  misc_feature (22)..(22): n is a, c, g, or t
cttcctgatgaaaatggagaangtaaaatgtaaacaaaagcttagtta

SEQ ID NO: 1230 - DNA, 36 bp, Homo sapiens
  misc_feature (19)..(19): n is a, c, g, or t
tgtcccccaaacacgtggnctttgccacgatcccac

SEQ ID NO: 1231 - DNA, 38 bp, Homo sapiens
  misc_feature (20)..(20): n is a, c, g, or t
tcccagtcacctaaggacantgacgtgtcccccaaaca

SEQ ID NO: 1232 - DNA, 40 bp, Homo sapiens
  misc_feature (21)..(21): n is a, c, g, or t
cccagctctatgagatgttcncttcggtgatgaaacacct

SEQ ID NO: 1233 - DNA, 40 bp, Homo sapiens
  misc_feature (22)..(22): n is a, c, g, or t
ggaattttgggatggggaagangagcattgaggaccgtgt

SEQ ID NO: 1234 - DNA, 37 bp, Homo sapiens
  misc_feature (19)..(19): n is a, c, g, or t
gtgttcaagaggaagcccnctgccttgtggaggagtt

SEQ ID NO: 1235 - DNA, 41 bp, Homo sapiens
  misc_feature (22)..(22): n is a, c, g, or t
atgtgatcactagcacatcatntggagtgaacatcgactct

SEQ ID NO: 1236 - DNA, 34 bp, Homo sapiens
  misc_feature (18)..(18): n is a, c, g, or t
cgcatctcccacccccangacgcccctttcgccc

SEQ ID NO: 1237 - DNA, 37 bp, Homo sapiens
  misc_feature (19)..(19): n is a, c, g, or t
agccatgattgtggcacanaaccccaacctgggtgac

SEQ ID NO: 1238 - DNA, 38 bp, Homo sapiens
  misc_feature (20)..(20): n is a, c, g, or t
agccatgattgtggcacatnaaccccaacctgggtgac

SEQ ID NO: 1239 - DNA, 40 bp, Homo sapiens
  misc_feature (20)..(20): n is a, c, g, or t
tttgggaaaccttctgcagntggatagaagaggcctactc

SEQ ID NO: 1240 - DNA, 36 bp, Homo sapiens
  misc_feature (20)..(20): n is a, c, g, or t
gtcgaccatggcgatttttncccggccagagaaggc

SEQ ID NO: 1241 - DNA, 37 bp, Homo sapiens
  misc_feature (18)..(18): n is a, c, g, or t
tccgctcctccacactcngctttcccatcccgaagtc

SEQ ID NO: 1242 - DNA, 43 bp, Homo sapiens
  misc_feature (23)..(23): n is a, c, g, or t
aaagaaagatgaggtgaaagganggagaaaatagggaggagga

SEQ ID NO: 1243 - DNA, 40 bp, Homo sapiens
  misc_feature (23)..(23): n is a, c, g, or t
caggacacagaagtatttctcancctgagcactgctctcc

SEQ ID NO: 1244 - DNA, 43 bp, Homo sapiens
  misc_feature (23)..(23): n is a, c, g, or t
tgacattcttcaacaccagatcngagctgttccctttgagaac

SEQ ID NO: 1245 - DNA, 32 bp, Homo sapiens
  misc_feature (17)..(17): n is a, c, g, or t
ccccgcctgtacccttnctccctcggcccctg

SEQ ID NO: 1246 - DNA, 36 bp, Homo sapiens
  misc_feature (17)..(17): n is a, c, g, or t
ccccagcccacctgtcnaagctcattcctcctctct

SEQ ID NO: 1247 - DNA, 41 bp, Homo sapiens
  misc_feature (20)..(20): n is a, c, g, or t
atatgtatcgtgccccctcnggtgtctttgatcaggatgac

SEQ ID NO: 1248 - DNA, 37 bp, Homo sapiens
  misc_feature (17)..(17): n is a, c, g, or t
ttgcagtaggggcagcngtgggaccacctttgaatcc

SEQ ID NO: 1249 - DNA, 39 bp, Homo sapiens
  misc_feature (21)..(21): n is a, c, g, or t
ggtcagtcctcatctctgtcntgcttcataggtgccacc

SEQ ID NO: 1250 - DNA, 40 bp, Homo sapiens
  misc_feature (16)..(16): n is a, c, g, or t
gcagcctgcctcgtcngatttttatctcacctggtaagtt

SEQ ID NO: 1251 - DNA, 40 bp, Homo sapiens
  misc_feature (16)..(16): n is a, c, g, or t
cagcctgcctcgtcangatttttatctcacctggtaagtt

SEQ ID NO: 1252 - DNA, 48 bp, Homo sapiens
  misc_feature (26)..(26): n is a, c, g, or t
ctgtccaactaatcttgatattaaancatcacaagtattgcaaacaag

SEQ ID NO: 1253 - DNA, 49 bp, Homo sapiens
  misc_feature (27)..(27): n is a, c, g, or t
tccaactaatcttgatattaaatcatncatcacaagtattgcaaacaag

SEQ ID NO: 1254 - DNA, 47 bp, Homo sapiens
  misc_feature (23)..(23): n is a, c, g, or t
ccctgaaggattcatctaatttntcagtttcttttctgttgaaaatc

SEQ ID NO: 1255 - DNA, 48 bp, Homo sapiens
  misc_feature (24)..(24): n is a, c, g, or t
ccctgaaggattcatctaattttntcagtttcttttctgttgaaaatc

SEQ ID NO: 1256 - DNA, 91 bp, Homo sapiens
ccggagagggtgtacttggttctgaggctgtggtttctccycaggctgagatggatcttgaggcggcaaagaacggaacagcctggcgccc

SEQ ID NO: 1257 - DNA, 101 bp, Homo sapiens
gccatagctcacggatcaggtctccccctcatgatgatagtatttggagaratgactgacaaatttgttgatactgcaggaaacttctcctttccaggtaa

SEQ ID NO: 1258 - DNA, 101 bp, Homo sapiens
aacttttctccctatacaaaagtgatcactgtttcttttctgtccagatastctcggcatttagtgacaaagaactagctgcttatgcaaaagcaggcgcc

SEQ ID NO: 1259 - DNA, 101 bp, Homo sapiens
acataaagatcaaaagagaccatagccttttttctcaaccagggtttcacstttgggaaagctggcgagatcctcaccagaagactgcggtcaatggcttt

SEQ ID NO: 1260 - DNA, 101 bp, Homo sapiens
tgaattcctctacttctgtctagggtgttttctgcaattgtatttggtgcrgtggctctaggacatgccagttcatttgctccagactatgctaaagctaa

SEQ ID NO: 1261 - DNA, 101 bp, Homo sapiens
ggaaatataacatttaatgaagtcgtgttcaactatcccacccgagcaaaygtgccagtgcttcaggggctgagcctggaggtgaagaaaggccagacact

SEQ ID NO: 1262 - DNA, 101 bp, Homo sapiens
tcccatgaggagctggaacctgacagcatcgagcgacggcctgtcaaagayggtgtgtgtgtgttcagtcctggcttctggaagtggccgccttcccatct

SEQ ID NO: 1263 - DNA, 101 bp, Homo sapiens
tgactctcattgcctaacccccttgtgtcttggccccaggttgattgtccrgggctaccgccagcccctggagggcagtgacctctggtccttaaacaagg

SEQ ID NO: 1264 - DNA, 101 bp, Homo sapiens
agtcattccaggccctctctttgctcctttgcaggttgctcatcaagttcrtgaatgacacgaaggccccagactggcagggctacttctacaccgtgctg

SEQ ID NO: 1265 - DNA, 101 bp, Homo sapiens
ttgggctacctatggctcctggccccctggcagcttctccacgtgtataartccaggaccaagagatcctctaccaccaaactctatcttgctaagcaggt

SEQ ID NO: 1266 - DNA, 101 bp, Homo sapiens
atattgtttttcttttgcttttttcctggcaggtcaaaaatatgaagaatraagacaaacgtttaaagatcatgaatgagattcttagtggaatcaaggtg

SEQ ID NO: 1267 - DNA, 101 bp, Homo sapiens
gtctttcagtgtgaacctggacattatggcaggccaacttgtggctgtgayaggccctgtcggctctgggaaatcctccttgatatcagccatgctgggag

SEQ ID NO: 1268 - DNA, 101 bp, Homo sapiens
agttctggggaatggaacaattgtagagaaaggatcctacagtgctctcckggccaaaaaaggagagtttgctaagaatctgaagacatttctaagacata

SEQ ID NO: 1269 - DNA, 101 bp, Homo sapiens
tcagggattcctgtgcatggtgctgacaaaactgcttccatctctaggtayatttgtgttcatagcacatttctggagtgcctttggtttcgtccatgcat

SEQ ID NO: 1270 - DNA, 101 bp, Homo sapiens
atctgcatggccactcctgtcttcaccatcatcgtcattcctcttggcatyatttatgtatctgttcaggtaggtttggaaatggctaagtcatccttcct

SEQ ID NO: 1271 - DNA, 101 bp, Homo sapiens
gctggaaagtcatccctcacaaactgcctcttcagaatcttagaggctgcyggtggtcagattatcattgatggagtagatattgcttccattgggctcca

SEQ ID NO: 1272 - DNA, 101 bp, Homo sapiens
agaccattgcccgctgggaggtctttctcttcctggctatcctgctgcaaygggtggaattcagcgtgccactgggcgtgaaggtggacatgacccccatc

SEQ ID NO: 1273 - DNA, 101 bp, Homo sapiens
atcacattcctctgcccttcctgcaggcaggaacaaacagggctgccttcyggccttgtaagacccttattgctgtcctggaggggctggggacttgtgtc

SEQ ID NO: 1274 - DNA, 101 bp, Homo sapiens
tgattatctttggcatgggcaagcggaagtgtatcggtgagaccattgccmgctgggaggtctttctcttcctggctatcctgctgcaacgggtggaattc

SEQ ID NO: 1275 - DNA, 101 bp, Homo sapiens
gtttctcacccctgatggtgctatcgacaaggtgttaagtgagaaggtgawtatctttggcatgggcaagcggaagtgtatcggtgagaccattgcccgct

SEQ ID NO: 1276 - DNA, 101 bp, Homo sapiens
tgtaccttgtgaccaagcctgagatacagaggaagatccagaaggagctgrgtacatgggggcccccaaccctatagccaggagaagccttgagacccagg

SEQ ID NO: 1277 - DNA, 101 bp, Homo sapiens
aggccttcatcctggagaccttccgacactcctccttcttgcccttcaccwtcccccacaggtgaggcctgccggttctgccctcccacctctaaagtgct

SEQ ID NO: 1278 - DNA, 101 bp, Homo sapiens
gttcctcttgcagagagctgtgggaggacccctctgagttccggcctgagyggttcctcaccgccgatggcactgccattaacaagcccttgagtgagaag

SEQ ID NO: 1279 - DNA, 101 bp, Homo sapiens
ggtatcctgatgtgcagactcgagtgcaggcagaattggatcaggtcgtgkggagggaccgtctgccttgtatgggtgaccagcccaacctgccctatgtc

SEQ ID NO: 1280 - DNA, 101 bp, Homo sapiens
cttgtatgggtgaccagcccaacctgccctatgtcctggccttcctttatraagccatgcgcttctccagctttgtgcctgtcactattcctcatgccacc

SEQ ID NO: 1281 - DNA, 212 bp, Homo sapiens
ttcctttatgaagccatgcgcttctccagctttgtgcctgtcactattcctcatgccaccactgccaacacctctgtcttgggctaccacattcccaaggacactgtggttttcctttatgaagccatgcgcttctccagctttgtgcctgtcactattccactgccaacacctctgtcttgggctaccacattcccaaggacactgtggtt

SEQ ID NO: 1282 - DNA, 101 bp, Homo sapiens
tcaacaaggacctgaccagcagagtgatgattttttcagtgggcaaaaggyggtgcattggcgaagaactttctaagatgcagctttttctcttcatctcc

SEQ ID NO: 1283 - DNA, 101 bp, Homo sapiens
ccaaggacactgtggtttttgtcaaccagtggtctgtgaatcatgacccastgaagtggcctaacccggagaactttgatccagctcgattcttggacaag

SEQ ID NO: 1284 - DNA, 101 bp, Homo sapiens
gagcctgctggcaggatgcataccctcagctcagctctctcacctgggcayatgttcccatccccaacttaccgtaatttgtaacaggtgctccctaccca

SEQ ID NO: 1285 - DNA, 101 bp, Homo sapiens
taatattccacccctcctccctagagagtgcagccgggggtcagtaggggktgaggctgcactgagagtgggcttcaccttcacccctcctgcctctcctc

SEQ ID NO: 1286 - DNA, 101 bp, Homo sapiens
ccaccccagccgtcaccatctatcatcccactaccaccatgctggcctcarggatgcttctggtggccttgctggtctgcctgactgtaatggtcttgatg

SEQ ID NO: 1287 - DNA, 101 bp, Homo sapiens
ccgtcaccatctatcatcccactaccaccatgctggcctcagggatgcttytggtggccttgctggtctgcctgactgtaatggtcttgatgtctgtttgg

SEQ ID NO: 1288 - DNA, 101 bp, Homo sapiens
tggcagttccgagagaaatatggggacgtcttcacggtacacctgggaccsaggcccgtggtcatgctgtgtggagtagaggccatacgggaggcccttgt

SEQ ID NO: 1289 - DNA, 101 bp, Homo sapiens
gcttacattggccacagtgtggagaagcaccgtgaaaccctggaccccagmgcccccaaggacctcatcgacacctacctgctccacatggaaaaagtggg

SEQ ID NO: 1290 - DNA, 101 bp, Homo sapiens
atcctgtcgcgctatgggcccgcgtggcgcgagcagaggcgcttctccgtstccaccttgcgcaacttgggcctgggcaagaagtcgctggagcagtgggt

SEQ ID NO: 1291 - DNA, 101 bp, Homo sapiens
taggccagcctttcgaccccaccttcctcatcggctgcgcgccctgcaacrtcatagccgacatcctcttccgcaagcattttgactacaatgatgagaag

SEQ ID NO: 1292 - DNA, 101 bp, Homo sapiens
gcccctgaagcctctgccagaggccaacgccccttcttggttcaggagagstgcagtgttaggtgcagcacaaccaatgacttgcttatgtggctaataaa

SEQ ID NO: 1293 - DNA, 101 bp, Homo sapiens
cctactccaaacaaatgcatggggatgtggctggagttccccgttgtctarccagtgccaaagggcaggacggtacctcaccccacgttcttaactatggg

SEQ ID NO: 1294 - DNA, 101 bp, Homo sapiens
aaaataatagaacccttccctctttaccagaaaaagtacaagctgagattracagagtgattggccaggggcagcagccgagcacagccgcccgggagtcc

SEQ ID NO: 1295 - DNA, 100 bp, Homo sapiens
tcaccctgatgtccagcagaaactgcaggaggagattgacgcagttttasccaataaggtaaggggatgatcccctggagaaggagggagaaggtgaagc

SEQ ID NO: 1296 - DNA, 101 bp, Homo sapiens
tgctcttcaccgtgacccaaagtactggacagagcctgagaagttcctccytgaaaggtacaaggcccctgggaagggagccctccctgaaccagcctggt

SEQ ID NO: 1297 - DNA, 101 bp, Homo sapiens
ggtccctatcattgcccagtatggagatgtgttggtgagaaatctgaggcrggaagcagagacaggcaagcctrtcaccttgaaaragtaagtagaagcgc

SEQ ID NO: 1298 - DNA, 101 bp, Homo sapiens
tgaacatgaaacttgctctaatcagagtccttcagaacttctccttcaaaycttgtaaagaaacacaggttagtcaattttctataaaaataatgttgtat

SEQ ID NO: 1299 - DNA, 202 bp, Homo sapiens
aaaacaccaagaagcttttaagatttgattttttggatccattctttctcycaataagtatgtggactactatttccttttatttatcttgctctcttaaatctgctttgaactctagccttttggtccagtgggatttatgaaaagtgccrtctctatagctgaggatgaagaatggaagagattacgatcattgctgtct

SEQ ID NO: 1300 - DNA, 101 bp, Homo sapiens
taagtacattaaaaataataatcaaatattattttgtttctcctcccaggrcttttgtatgtttgacatggaatgtcataaaaagtatggaaaagtgtggg

SEQ ID NO: 1301 - DNA, 101 bp, Homo sapiens
catcacagatcccgacgtgatcagaacagtgctagtgaaagaatgttattmtgtcttcacaaatcgaagggtaagcatccattttttgaaatttaaataat

SEQ ID NO: 1302 - DNA, 101 bp, Homo sapiens
gattactggcacatcatttggagtgaacatcgactctctcaacaatccacragacccctttgtggagagcactaagaagttcctaaaatttggtttcttag

SEQ ID NO: 1303 - DNA, 101 bp, Homo sapiens
gccaatggctccacttgagtttgtgataagaacccagaacccttggactcyccagtaacattgattgagttgtgtatgattctacatagaatattaactca

SEQ ID NO: 1304 - DNA, 101 bp, Homo sapiens
cagtaacattgattgagttgtgtatgattctacatagaatattaactcaawggaggtcagtgagtggtgtgtgtgtgattatttgccaactgccgaggtgg

SEQ ID NO: 1305 - DNA, 101 bp, Homo sapiens
ccagaacccttggactccccagtaacattgattgagttgtgtatgattctwcatagaatattaactcaatggaggtcagtgagtggtgtgtgtgtgattat

SEQ ID NO: 1306 - DNA, 101 bp, Homo sapiens
aacccagaacccttggactccccagtaacattgattgagttgtgtatgatwctacatagaatattaactcaatggaggtcagtgagtggtgtgtgtgtgat

SEQ ID NO: 1307 - DNA, 101 bp, Homo sapiens
tctccagcatataaacaatccaacagcctcactgaatcactgctgtgcagrgcaggaaagctccacacacacagcccagcaaacagcagcacgctgctgaa

SEQ ID NO: 1308 - DNA, 102 bp, Homo sapiens
acccacctccaatacctcaagctgtcctattatgccttccctaacccaggatgaagatgacatcaaactgtcagatgcagacctccgggctgaagtggacac

SEQ ID NO: 1309 - DNA, 100 bp, Homo sapiens
acccacctccaatacctcaagctgtcctattatgccttccctaacccagggaagatgacatcaaactgtcagatgcagacctccgggctgaagtggacac

SEQ ID NO: 1310 - DNA, 101 bp, Homo sapiens
atgatctgggcaaaatgacttatctgaccatgtgcatcaaggagagcttcygcctctacccacctgtgccccaggtgtaccgccagctcagcaagcctgtc

SEQ ID NO: 1311 - DNA, 101 bp, Homo sapiens
tccgggctgaagtggacacattcatgtttgaaggccatgacaccaccaccrgtggtatctcctggtttctctactgcatggccctgtaccctgagcaccag

SEQ ID NO: 1312 - DNA, 101 bp, Homo sapiens
gaccctctgcttgttacttcccaacaggcgtcgggtttggagttcaagtcrgtagccgacagcgttctgtttttacgtgacaaaagatgggaagaggtcag

SEQ ID NO: 1313 - DNA, 101 bp, Homo sapiens
cctcagacatcccaagccttctcctttcattggaaacttgacatttttccrccaggtaagggctgtcttccattggcttccatcataaaatatgctgaggg

SEQ ID NO: 1314 - DNA, 101 bp, Homo sapiens
tcaagtatcatttccatccataatggtcccactggcccggattttgcccartaagaaccgagacgaactgaatggcttttttaacaaactcattaggaatg

SEQ ID NO: 1315 - DNA, 101 bp, Homo sapiens
gtatccacccccgacctggtgtttccctcagattcacacgggaggcagctsaggactgcgaggtgctggggcagcgcatccccgcaggcgctgtgctagag

SEQ ID NO: 1316 - DNA, 101 bp, Homo sapiens
ggccgtgggtgccctgcaccatgaccctgagcactggccaagcccggagamcttcaaccctgaaaggtgagtactgccccttttaaaaagctctgaaggga

SEQ ID NO: 1317 - DNA, 101 bp, Homo sapiens
ttcctcatggagaggatttttgatgtgcagcttccacattacagccccagwgatgaaaaggccaggatgaaactgtgagtggctggagatggcacctgtgg

SEQ ID NO: 1318 - DNA, 101 bp, Homo sapiens
aaatccttttggtcttgctagcgcaactccagccaccagcacatcaatgaktcgaagagcttttgaagctggatggggttttgccctcaccaaaactttct

SEQ ID NO: 1319 - DNA, 101 bp, Homo sapiens
cctaggttccattttcccaactgctgaacttcaagctcgttgggtgacaasagttttcaaaggtaagtgtgtaggcaggtgagtggctaagcgtttcagat

SEQ ID NO: 1320 - DNA, 101 bp, Homo sapiens
gagccgtatctctgaagatggctatccttgggactcagtgttccacacccrgtttcgttctatgctccgcaatgtactgccacgaacagctgtaaaatgga

SEQ ID NO: 1321 - DNA, 101 bp, Homo sapiens
cctgaggctcatgcatttggctaatgagctgcggtttctcttcaggtcggratggatcttgaaggggaccgcaatggaggagcaaagaagaagaacttttt

SEQ ID NO: 1322 - DNA, 101 bp, Homo sapiens
cacggatactatacactctattgcatgattctcctgcctacatcagaagaygtttataagcctattttaaaggataccagttggaatctctcttttattaa

SEQ ID NO: 1323 - DNA, 101 bp, Homo sapiens
ttcatcctcacctatagaaaattcaattataaagacaatacagatctggtygagtttaaaactctcactgaggaagaggttgaagaagtgctgagaaatat

SEQ ID NO: 1324 - DNA, 101 bp, Homo sapiens
taatccagtgacatctcatagagatgtaccactttcttattgcaactcagrctgcaattgtgatgaaagtcaatgggaaccagtctgtggaaacaatggaa

SEQ ID NO: 1325 - DNA, 101 bp, Homo sapiens
cttaaggtccaaacctcagaaccctcgggcacctgagagagatgttttgcrgcgatgtcgtgttggagggatgaagatggagttatcctctgcagaaattc

SEQ ID NO: 1326 - DNA, 100 bp, Homo sapiens
ttgaccgcgtgggccgcatctaccccatggccatgtcaaatttgttggcrggggcagcctgcctcgtcatgatttttatctcacctggtaagttggtaag

SEQ ID NO: 1327 - DNA, 100 bp, Homo sapiens
tcccgggggccttcatagccctcatcaccattgaccgcgtgggccgcatytaccccatggccatgtcaaatttgttggcgggggcagcctgcctcgtcat

SEQ ID NO: 1328 - DNA, 101 bp, Homo sapiens
aggagctgaactatacagtgccaggcctggggcccgcgggcgaggccttcyttggccagtgcaggcgctatgaagtggactggaaccagagcgccctcagc

SEQ ID NO: 1329 - DNA, 101 bp, Homo sapiens
tttccagacctgcactggttaaacatcataatcatgtgtgttggccgaatrggaatcaccattgcaatacaaatgatctgcctggtgaatgctgagctgta

SEQ ID NO: 1330 - DNA, 101 bp, Homo sapiens
tgtcaccgaaaagctgagcccttcatttgcagacctgttccgcacgccgcrcctgaggaagcgcaccttcatcctgatgtacctgtggtgaggggcgttcc

SEQ ID NO: 1331 - DNA, 101 bp, Homo sapiens
ctgagccatcatgcccaccgtggatgacattctggagcaggttggggagtytggctggttccagaagcaagccttcctcatcttatgcctgctgtcggctg

SEQ ID NO: 1332 - DNA, 99 bp, Homo sapiens
agaaaagcaaagcccaaagaaaacacgatttaccttaaggtccaaacctcmgaaccctcgggcacctgagagagatgttttgcggcgatgtcgtgttgg

SEQ ID NO: 1333 - DNA, 101 bp, Homo sapiens
ggtgtttgaagatatttcagccaacacagttaacatggctctgcaaatccygcagtattttcttctcacctgtggcgaagtggtcttctctgtcacgggat

SEQ ID NO: 1334 - DNA, 101 bp, Homo sapiens
cagcctaggcgacagagtgagactgtctcaaaaaacaataacaacaacaamaaaaaaacccatcagaaaacagctaagagttttgtggtggtttattttag

SEQ ID NO: 1335 - DNA, 101 bp, Homo sapiens
atggtggctgtaggaatctgtcacacagatgaccacgtggttagtggcaamctggtgaccccccttcctgtgattttaggccatgaggcagccggcatcgt

SEQ ID NO: 1336 - DNA, 101 bp, Homo sapiens
aacgcaaaggatgtggcagtttcctactaccacttctaccacatggccaargtgcaccctgagcctgggacctgggacagcttcctggagaagttcatggt

SEQ ID NO: 1337 - DNA, 101 bp, Homo sapiens
atgtggcagtttcctactaccacttctaccacatggccaaggtgcaccctsagcctgggacctgggacagcttcctggagaagttcatggtcggagaaggt

SEQ ID NO: 1338 - DNA, 101 bp, Homo sapiens
tcccagaacacccaatctgggctacagctttgagactaactcagggaaccscttccactacttcagctatggggtggcttgctctgaagtagaaatcgact

SEQ ID NO: 1339 - DNA, 101 bp, Homo sapiens
cgaatcaaacctgaccaagcggctcaagaataaaatatgaattgagggccygggacggtaggtcatgtctgtaatcccagcaatttggaggctgaggtggg

SEQ ID NO: 1340 - DNA, 101 bp, Homo sapiens
cacatatgctaatacctatctactgctgagttgtcagtatgttatcactakaaaacaaagaaaaatgattaataaatgacaattcagagccatttattctc

SEQ ID NO: 1341 - DNA, 101 bp, Homo sapiens
ccatcgatacggggagtcgtgattgtacttggagctggagacactgccttygactgtgcaacatctgctctacgttgtggagctcgccgtgtgttcatcgt

SEQ ID NO: 1342 - DNA, 101 bp, Homo sapiens
atccagaggtgctactgcaattacaccacagatgtggttgccagcgtcgcstttggcaccccggtggactcctggcaggcccctgaggatccctttgtgaa

SEQ ID NO: 1343 - DNA, 101 bp, Homo sapiens
tcatgagattgtagtggtggtgcctgaagttaatttgcttttgaaagaatmcaaatactacacaagaaaaatctatccagtgccgtatgaccaagaagagc

SEQ ID NO: 1344 - DNA, 101 bp, Homo sapiens
ttgactttccgtttctggaagattccgtcaaagtggtcaaaaacaagatayccctgtataaaaaggtcttccctcctaacctggaaaggccaactcttgca

SEQ ID NO: 1345 - DNA, 101 bp, Homo sapiens
ctaacatcgcttccagtaagggagaaactgaagaggaaagactgtcttgcyagaaatggccagcttgtgcagactccgagtccttcagtgacaaaggcctt

SEQ ID NO: 1346 - DNA, 81 bp, Homo sapiens
ggtctccaaagctctttccattgcccagggagggaaggttytgagcaataaagtttcttagatcaatcagccaagtctgaa

SEQ ID NO: 1347 - DNA, 101 bp, Homo sapiens
gtgaggtgttcttttcccttgcttcccatatttgtcccagttgcagccctsttgttatgtatttactcttcaatttcttatttatacctctcactcaattg

SEQ ID NO: 1348 - DNA, 101 bp, Homo sapiens
tgctttgtgaaactgttcgaactgccaaactgactccagtttctgcccagyttcaagatattgaaggaaaaattgaccgatttattattcctagagaggta

SEQ ID NO: 1349 - DNA, 101 bp, Homo sapiens
gtccaggagctgctgccctcctcctttgggcctgaggacctgcagaagacycagtgacagccagagaatgcccactgcctgtaacagccacctggagaact

SEQ ID NO: 1350 - DNA, 101 bp, Homo sapiens
tactgggaattgagacagaaaggaagtgttcaccacgattaccgtggcatsctctacagactcctgggagacagcaagatgtccttcgaggacatcaaggc

SEQ ID NO: 1351 - DNA, 101 bp, Homo sapiens
gaatgctgccctacatcgtcatgggtagtctgactgtcctgattggaatcytcaccctttttttccctgaaagtttgggaatgactcttccagaaacctta

SEQ ID NO: 1352 - DNA, 101 bp, Homo sapiens
gcaagggccaaagagtttggagccactgaatgtattaaccctcaggatttwagtaaacccatccaggaagtgctcattgagatgaccgatggaggagtgga

SEQ ID NO: 1353 - DNA, 101 bp, Homo sapiens
tgcctgtgctacaattcattgtgttacctgtagattcaggtaatacaaacyatatataatcatcaagtaatacaaactaatttagtaatagcctgggttaa

SEQ ID NO: 1354 - DNA, 101 bp, Homo sapiens
aggcttccctgacttgctttagtttttaagatttgtgtttttctttttccmcaaggaataaatgagagggaatcgactgtattcgtgcatttttggatcat

SEQ ID NO: 1355 - DNA, 101 bp, Homo sapiens
cagtttaggctggtgggcccagggcagtggccaggagccagaaatgccatrctgacccagtgggaccggtcgttgaaacccatgcagacacgagtggtcgg

SEQ ID NO: 1356 - DNA, 101 bp, Homo sapiens
cccaggggcttcagaaaaggagtggccacagcaccccgaagggagcatctrtttacctggcagtggctctcagagcagcagaacgggttcagttttagact

SEQ ID NO: 1357 - DNA, 101 bp, Homo sapiens
ccaggagactgctatcatggcagagaagcccaagctccactacttcaatgyacggggcagaatggagtccacccggtggctcctggctgcagctggagtag

SEQ ID NO: 1358 - DNA, 101 bp, Homo sapiens
ctctcttttttgactagggtcctggtcctggacaaaggagtagtagctgartttgattctccagccaacctcattgcagctagaggcatcttctacgggat

SEQ ID NO: 1359 - DNA, 101 bp, Homo sapiens
aggattgatatgtatatagaaggtatagcagatttgggtgaaatgatcctycttctgcccgtatgtccacctgaggaaaaagatgccaagcttgccttgat

SEQ ID NO: 1360 - DNA, 101 bp, Homo sapiens
tatagaaggtatagcagatttgggtgaaatgatcctccttctgcccgtatstccacctgaggaaaaagatgccaagcttgccttgatcaaagagaaaataa

SEQ ID NO: 1361 - DNA, 101 bp, Homo sapiens
tttgtgttctgcgttcccaggaagttctccctggacgacctgctgaccaaygtcatgctctactggacaacaggcaccatcatctcctcccagcgcttcta

SEQ ID NO: 1362 - DNA, 101 bp, Homo sapiens
ttgagcttatattgaaatttattgttccaattcacaggttacatgaaaaamaatttactaagcttaactacatgtcacacattgtacatggaaacaagaac

SEQ ID NO: 1363 - DNA, 101 bp, Homo sapiens
ctgcccgtatgtccacctgaggaaaaagatgccaagcttgccttgatcaargagaaaataaaaaatcgctacttccctgcctttgaaaaagtaagtgaagc

SEQ ID NO: 1364 - DNA, 101 bp, Homo sapiens
atgtccacctgaggaaaaagatgccaagcttgccttgatcaaagagaaaayaaaaaatcgctacttccctgcctttgaaaaagtaagtgaagcagttcagt

SEQ ID NO: 1365 - DNA, 101 bp, Homo sapiens
gctgacattcatctggtggaacttctctactacgtcgaggagcttgactcyagtcttatctccagcttccctctgctgaaggtgacccatttcacagccca

SEQ ID NO: 1366 - DNA, 101 bp, Homo sapiens
tccgtgcccatctgggagcgggcaccctggtgtgagaccattgtgggtgcyttcagcctcccggaccagtacagcccccgcctcatgagctcccatcttcc

SEQ ID NO: 1367 - DNA, 101 bp, Homo sapiens
gcccaggcttcctgggtcctgcctggtcctccctcccaaggagccattctrtgtgtgactctgggtggaagtgcccagcccctgcccctacgggcgctgca

SEQ ID NO: 1368 - DNA, 101 bp, Homo sapiens
gactggccccaggagggagaggtgacctttgagaacgcagagatgaggtamcgagaaaacctccctctcgtcctaaagaaagtatccttcacgatcaaacc

SEQ ID NO: 1369 - DNA, 101 bp, Homo sapiens
attgattcaagagaccatccgagaagcatttgcagactgtaccatgctgamcattgcccatcgcctgcacacggttctaggctccgataggattatggtgc

SEQ ID NO: 1370 - DNA, 101 bp, Homo sapiens
cctgagcagacagacgggagctttatctaaggctattgacagaggaacaargggtatcagttttgtcctgagtgctttggtatttaatcttcttcccatca

SEQ ID NO: 1371 - DNA, 101 bp, Homo sapiens
cggagtagttgaaaagcaggaagtccatcttgtagaggtcgaagaggcgcygctggtagaaggggctgatgtcccggaagaggcgcgctgccaggtcgcgg

SEQ ID NO: 1372 - DNA, 101 bp, Homo sapiens
caccaatgctgtcatccatgaggtgcagagaatcggcaacatcatcccccwgaacgttcccagggaagtgacagttgataccactttggctgggtaccacc

SEQ ID NO: 1373 - DNA, 101 bp, Homo sapiens
tctgcctcaggagaaactgaaaccagaatacctgcaggcactccctgaaawgctgaagctctactcacagtttctggggaagcagccatggtttcttgggg

SEQ ID NO: 1374 - DNA, 101 bp, Homo sapiens
tgttcctgtagacagtcagcgatggccagagggtggtgtggtgtccagggrtccatctttccagaatccatgcctgtgtaatgctggtccatgcttctgaa

SEQ ID NO: 1375 - DNA, 100 bp, Homo sapiens
aaatctctggttgacccaaagaaccttgacaccactccattgtcaatggwtttgcctctgtgccgcccttctaccagctgtgcttcattcctgtctgaag

SEQ ID NO: 1376 - DNA, 101 bp, Homo sapiens
attattcttttttggatttctcatttatggaaggctaaccctctgttgacygtaagccttttggtttgggctgtattgaaatcctttctaaattgcatgaa

SEQ ID NO: 1377 - DNA, 101 bp, Homo sapiens
ctgtgccggtgcaggtctggtgggcggggccagggaaaggcggggtcaggrcggggttcgcggaagaggcgggtataagaatggggggaagatgcgggaaa

SEQ ID NO: 1378 - DNA, 101 bp, Homo sapiens
gcggggccagggaaaggcggggtcagggcggggttcgcggaagaggcgggyataagaatggggggaagatgcgggaaaggaaggggcgtggtggctagagg

SEQ ID NO: 1379 - DNA, 101 bp, Homo sapiens
aggcggggtcagggcggggttcgcggaagaggcgggtataagaatgggggsaagatgcgggaaaggaaggggcgtggtggctagagggaagagaagaaaca

SEQ ID NO: 1380 - DNA, 101 bp, Homo sapiens
gcattcctttctttggccctgccaggtgatgtgtccaatctagatcccaasttctcatttgaaggcaccaaactggatgtggggaacattgtgctggcatt

SEQ ID NO: 1381 - DNA, 101 bp, Homo sapiens
cccagaccctgggcaaacagagctactgagacttggaacctcattgctacsacagacttgcactgaagccggacagctgcccagacacatgggcttgtgac

SEQ ID NO: 1382 - DNA, 101 bp, Homo sapiens
ccagcaagccttcttggtctcacctgcaggtctacgaccccttccgtttcraccaagagaacatcaaggagaggtcacctctggcttttattcccttctcg

SEQ ID NO: 1383 - DNA, 101 bp, Homo sapiens
caacaactatgacgaatcatgaaaaaaacgaacggattaacagggtcattsaagagttaggtctggataaagtggcagactccaaggtaatgtggaaaaac

SEQ ID NO: 1384 - DNA, 101 bp, Homo sapiens
gaaatggatttggaagatggaggagagatgcccaagcaacgggatcccaartctaactaaacaccatctggaatcctgatgtggaaagcaggggtttctgg

SEQ ID NO: 1385 - DNA, 101 bp, Homo sapiens
ccccagtttcttctccaacccccaggacttcaatccccagcacttcctgartgagaaggggcagtttaagaagagtgatgcttttgtgcccttttccatcg

SEQ ID NO: 1386 - DNA, 101 bp, Homo sapiens
tgccggctcccggaccttcgtgcaggaggacatctatgatgagtttgtggwgcggagcgttgcccgggccaagtctcgggtggtcgggaacccctttgata

SEQ ID NO: 1387 - DNA, 101 bp, Homo sapiens
aagatttgtgtttttctttttccacaaggaataaatgagagggaatcgacygtattcgtgcatttttggatcatttttaactgattcttatgattactatc

SEQ ID NO: 1388 - DNA, 101 bp, Homo sapiens
tcccttagccattgccttggaccaaaccacgtggtttgcagcttttctacragccaggggggaggttcccttggattaaggttccaaataaagcacatggt

SEQ ID NO: 1389 - DNA, 101 bp, Homo sapiens
cgtgaccagcatgggctccagcatgccaccctctccctctaatgggtccarcttctccctgcccaccaatctaaccgttgccactgtgaccacactgatgc

SEQ ID NO: 1390 - DNA, 101 bp, Homo sapiens
acttaaaataactattttaacccttgagtggcttctttttaaaccaaaaaycgtctttctttgcttttttatcacagcagaatcaggatctctttctcatt

SEQ ID NO: 1391 - DNA, 101 bp, Homo sapiens
ggctatggggctatccttgtggccctggcgggcctgctcatgactctcccrcacttcatctcggagccataccgctacgacaacaccagccctggtaagag

SEQ ID NO: 1392 - DNA, 101 bp, Homo sapiens
aaagccctgggagccactgactgcctcaatcctagagacttacataaacckatccaggaagttatcattgaattgaccaagggaggtgtggattttgccct

SEQ ID NO: 1393 - DNA, 101 bp, Homo sapiens
tcccaaagctggtcactgactataagaataagaaattcaatctggatgcaytggtgacccataccctgccttttgacaaaatcagtgaggcatttgaccta

SEQ ID NO: 1394 - DNA, 101 bp, Homo sapiens
agaagggcaggaaagcgtggctgtgttgagcagaacccggtgcaaaacggraagggtcaaacacctgcagagagagcaccagagccaggatagttaaggat

SEQ ID NO: 1395 - DNA, 101 bp, Homo sapiens
gaattcatggatttcgccgatgctcaatggaaagcacaagtacgaagtttrttttctctatttctgagttcatccaatggtttttttaacttatttttttc

SEQ ID NO: 1396 - DNA, 101 bp, Homo sapiens
tcgccgatgctcaatggaaagcacaagtacgaagtttgttttctctatttmtgagttcatccaatggtttttttaacttatttttttcgcattgcaggagt

SEQ ID NO: 1397 - DNA, 101 bp, Homo sapiens
tagggttctcagatgccatgactttcaaggagagagtacggaaccacatcrtgcacttggaggaacatttattttgccagtatttttccaaaaatgcccta

SEQ ID NO: 1398 - DNA, 101 bp, Homo sapiens
tatttctaacactatctgttctttcagtgatgtctccaagattaatgaagkaattggtgacaaaattggaatgttctttcagtcaatggcaacatttttca

SEQ ID NO: 1399 - DNA, 101 bp, Homo sapiens
cagcatgctggccaagggtcttcccccacgctcagtcctggtcaaaggctrccagacctttctgagtgcccccagggaggggctggggcgtctcagggtgc

SEQ ID NO: 1400 - DNA, 101 bp, Homo sapiens
ctccccagaggctcctcaccccctggtgccccctcttctccaggggtctgyggcgactggaagaaccacttcacggtggcccagagcgaagccttcgatcg

SEQ ID NO: 1401 - DNA, 101 bp, Homo sapiens
agctgatcgtgtcagcctcatgccccaggcctcatctttcatggaccaggycttgttccaggagtgggtgttgggtcctctgcttcctgtgctgtcccctg

SEQ ID NO: 1402 - DNA, 101 bp, Homo sapiens
catggaccaggccttgttccaggagtgggtgttgggtcctctgcttcctgwgctgtcccctggggaaggtcccgaggatgctgtcaggagatggaagagtc

SEQ ID NO: 1403 - DNA, 101 bp, Homo sapiens
agtttcttctccaacccccaggacttcaatccccagcacttcctgaatgasaaggggcagtttaagaagagtgatgcttttgtgcccttttccatcggtaa

SEQ ID NO: 1404 - DNA, 101 bp, Homo sapiens
cttcttgttgaatagacaatctgtggctccaactatccactgagcattgcyttcattgtggtgaatgaattctgcgagcgcttttcctattatggaatgaa

SEQ ID NO: 1405 - DNA, 81 bp, Homo sapiens
tagatgtggggcttctagattaccccctcctcctgccatamccgcacatgacaatggaccaaatgtgccacacgctcgctc

SEQ ID NO: 1406 - DNA, 101 bp, Homo sapiens
aaggcaacgatgatgacaaacatggcacagatggcatccagacggacggcraaccagcgggacgttgtcaaaaacaagaaccaagcctctgaatttgagaa

SEQ ID NO: 1407 - DNA, 101 bp, Homo sapiens
cattaacaatgtacctactctgttagccgcgtattgagttcagtggtgtcrttgatgtcaaaccatcctatttcctgtcgtagaatagcatgaaaaaactt

SEQ ID NO: 1408 - DNA, 101 bp, Homo sapiens
atctgaacagcttctctttattctgtagatggtggctgtaggaatctgtcrcacagatgaccacgtggttagtggcaacctggtgaccccccttcctgtga

SEQ ID NO: 1409 - DNA, 101 bp, Homo sapiens
gaccgggggcggtgcgaaacctcggcttcggagctggagcgcatgaatccyggcccaggcgggaagctgggacacgccctgcgggtggcctgtggggactc

SEQ ID NO: 1410 - DNA, 101 bp, Homo sapiens
ttatgcagtgttccccttccagcaggtgtccctctgcgtgggctgcctcaytggcctggtcatgttcgcgtattaccaggagtatcccatgagcattcagc

SEQ ID NO: 1411 - DNA, 101 bp, Homo sapiens
tcaggaataccagtggtagccctggggccagccagggaagcgagagggtgrcctttactatttgaatacagtttataactgtgaaggcaatattgctgtaa

SEQ ID NO: 1412 - DNA, 101 bp, Homo sapiens
gcatgaattcaaacacttaatgttcatccctcttatggatgattgttccaktatttccctacaggttacagctgctcctggacatagtttttttttccaaa

SEQ ID NO: 1413 - DNA, 81 bp, Homo sapiens
tggtataacggttcactcggttttgcatcagagactgggaktcgggggcagattatctttgccctggaccccagaatctcc

SEQ ID NO: 1414 - DNA, 101 bp, Homo sapiens
aacaaactgacaaggataaacatttcttctcctggatcaccagtcactgcygtaactgacgacttcaagcagggccaacgccacacgcttctagtgtgggc

SEQ ID NO: 1415 - DNA, 101 bp, Homo sapiens
tacaacctcttatatggaaacatcagtgcttcacctgaggaagtgtatgcrgtggcaaaattagctggacttcatgatgcaattcttcgaatgccacatgg

SEQ ID NO: 1416 - DNA, 101 bp, Homo sapiens
cccgtttcaaatacagcaccaagaacggagaccccttccacagcagcgacmctcctgaccaccactttgggtgctttccagccacataaatgacagacaac

SEQ ID NO: 1417 - DNA, 101 bp, Homo sapiens
tggtgggcagggagaagctggacccattagagggagagggtggcatgctgragcccatgctggtcacgatgctcccgatgccaatccagaaggccatgacg

SEQ ID NO: 1418 - DNA, 101 bp, Homo sapiens
tttgtgtctggaagagccctctgatttcttacactaatggccttacacgasatggaggattttacatttgatggaacaaagcgcttaagtgtcaactacgt

SEQ ID NO: 1419 - DNA, 101 bp, Homo sapiens
gtgccgtgttcaagaggacaaggaccacggcctggctgtgcccaccttcarttcctcaggaatgtgcttctcttctggcaacttcctcacttccggcatgg

SEQ ID NO: 1420 - DNA, 101 bp, Homo sapiens
actgtggatggcagccatgaaggaagatcccacagtctcagccctgcttamtagtgagaaagactggcaaggtttcctagagctctacttacagaacagcc

SEQ ID NO: 1421 - DNA, 101 bp, Homo sapiens
gatctgagcccagaaatgacccttcctccaccacacccctcctttgaggaygcccggggtctcccacaggcctgtgagttgcctcggcatatgacgcagaa

SEQ ID NO: 1422 - DNA, 101 bp, Homo sapiens
actctgtgccgggccctgggtgggcacagggggctcagagacaaatcacaygcagaccctacccttgaggcgctgacagcctggcagggcaattggtcacg

SEQ ID NO: 1423 - DNA, 101 bp, Homo sapiens
tcaaacttgtggtttgacacctgcatatacctggtttcactgtagtcactscttctccaatgctctctacaatcccagttgcctcatgtcccacaatcact

SEQ ID NO: 1424 - DNA, 101 bp, Homo sapiens
cgtaggaggctgtgatggaaaactggcgctccaggaacttgggcaggaagrtggccatgcccgcagccatggatgacaagcatacctgggacaggaccacc

SEQ ID NO: 1425 - DNA, 101 bp, Homo sapiens
tgtttagatatgacatttattcaaagttaaaagcaaacacttacagaattwtgaagaggtatctgtttaacatttcctcagtcaagttcagagtcttcaga

SEQ ID NO: 1426 - DNA, 101 bp, Homo sapiens
tggctttgtccatgggtcctaatttcaatccttatctttaggcattgaccytatccaacttggccaggaaggagtacaccgttggagaaacagtgaacctg

SEQ ID NO: 1427 - DNA, 101 bp, Homo sapiens
agttctactaatattgaggtggggactttgcaggtgaagttctccatctamctggagtacctacaagcaataggattgttttcgatattcttcatcatcct

SEQ ID NO: 1428 - DNA, 101 bp, Homo sapiens
agttatccgtgcctttgagcaccagcagcgatttctgaaacacaatgaggwgaggattgacaccaaccagaaatgtgtcttttcctggatcacctccaaca

SEQ ID NO: 1429 - DNA, 101 bp, Homo sapiens
aggaatatataaagacatatgctcaaaagaaggatcttttaagatacatayagtttgaggtaggggtctcataacttgtactgttgaaattaagatatgtg

SEQ ID NO: 1430 - DNA, 101 bp, Homo sapiens
attccaagggccagaggttatttaaaattatttacactcactggaaatcaygtggaggggctgggcccagctcagcagagagaaagagcccttctgtgcag

SEQ ID NO: 1431 - DNA, 81 bp, Homo sapiens
taacacacttttttttttcttttttttttttgagacagagyctcactctgtcggcctggctggagtgcagtggcacgatct

SEQ ID NO: 1432 - DNA, 81 bp, Homo sapiens
tggccaagcttgtcttaaactcctgacctcaggtgatccamccacctcagcctcccaaattgctgggattacaggcatgag

SEQ ID NO: 1433 - DNA, 81 bp, Homo sapiens
aattctcctgcctcagcctcccgagtagctgggattacagrcatgtgccaccacgcccggctaatttttgtatttttagtt

SEQ ID NO: 1434 - DNA, 81 bp, Homo sapiens
tccacctcccgggttcaaatgattctcctgcctcagcctcytgagtagctgggattacaggcacccaccaccatgcccggc

SEQ ID NO: 1435 - DNA, 81 bp, Homo sapiens
ctggctcaagcgatcctcctgagtagctaggactataggcwtgtcactgcacccagctaattttttttttttttttttttt

SEQ ID NO: 1436 - DNA, 101 bp, Homo sapiens
tcaaacgaaaaatccacacctccatcagtcatttcctttagcacttcctgratgggtttcttgtagtcttgagggttgatgcattcagtggcacccaactc

SEQ ID NO: 1437 - DNA, 101 bp, Homo sapiens
agggatggtaaaaaagaatcggctgtctttgatgctgtaatggtttgttcyggacatcatgtgtatcccaacctaccaaaagagtcctttccaggtaaggc

SEQ ID NO: 1438 - DNA, 101 bp, Homo sapiens
ctcctattgatctggtggacattagtgtagaaatggccggattgaagtttrtaaatccttttggtcttgctagcgcaactccagccaccagcacatcaatg

SEQ ID NO: 1439 - DNA, 101 bp, Homo sapiens
acagtgctgggaattccatggtgcaaactacagatggtacacctacatctstgcaggaagtggctccccacactgggaggctccctgcaaaccatgccccg

SEQ ID NO: 1440 - DNA, 101 bp, Homo sapiens
tgaaattggaccatttagaaataaccacagcctcttttgaatagatgcagycccccagaccttctctgtgctgattggaaaccgtgagtggctgaggcgca

SEQ ID NO: 1441 - DNA, 101 bp, Homo sapiens
gatctgctggaactgcttatcatgcatcctttcttaaaaccagatgatcarcaaaaggaagtggttaacatggcccagaaggctataattagatactttcc

SEQ ID NO: 1442 - DNA, 51 bp, Homo sapiens
tttaaaccttttattataagtcttayataaaccatttttgttactctcttc

SEQ ID NO: 1443 - DNA, 101 bp, Homo sapiens
gatgatcaccactattctcattctgttttttcctctcaggaaaaactgaascctcagtacttggaagagctacctggacaactgaaacaattctccatgtt

SEQ ID NO: 1444 - DNA, 101 bp, Homo sapiens
atctcactgcttaacggcgtgtgcctgattgtggggaacatgatcggctcrggcatctttgtttcccccaagggtgtgctcatatacagtgcctcctttgg

SEQ ID NO: 1445 - DNA, 101 bp, Homo sapiens
tccagaaaatgacagacctcagacagattgtcacggaacacgtgcagctaytgcaggtgatcaagaagacggagacagacatgagtcttcacccgctcctg

SEQ ID NO: 1446 - DNA, 101 bp, Homo sapiens
ggagaaaatggtgttgtggtgttttctctggggtcgatggtcagtaacacrtcagaagaaagggccaatgtaattgcatcagcccttgccaagatcccaca

SEQ ID NO: 1447 - DNA, 101 bp, Homo sapiens
tcctccgcagggctccagccacagcgctggctcagctcagccaccccaggrctctggcagtggtggtcaggtgtgaaacccaggaagacgatgcccacaca

SEQ ID NO: 1448 - DNA, 101 bp, Homo sapiens
gggccatttgtgattaacaaacattccaatggaaacaggaacaacgagagmaaccagagatgtacctaaagatgacagaagggcaatgtgatcagcagaac

SEQ ID NO: 1449 - DNA, 101 bp, Homo sapiens
aaatgctgagagatgccaacgaggtaaaggaaaggcctgctcaggtcccaraagagacccagatctctcctactgaagcctgaatgggcctgagacccctc

SEQ ID NO: 1450 - DNA, 101 bp, Homo sapiens
agatggacacaattctataaagcaattacctgattcagaaaaggaactgtraagcttattccaaacttggtgggaattatgcacaatcctctctttttcca

SEQ ID NO: 1451 - DNA, 101 bp, Homo sapiens
aatcatctgctattaaattagaagtttatcctacatctttaactaaaaatkatttggaagattctcttctgaaaattctcgatagatggatatatggtgtt

SEQ ID NO: 1452 - DNA, 101 bp, Homo sapiens
aaaaatgcttcaagacagggccaggaattggggtcaggacagaatctaggragtcatcagagttttgtcttcttggtctctagtttgatcatgttcccctg

SEQ ID NO: 1453 - DNA, 101 bp, Homo sapiens
attggaacaataaatttcaatataagctcaatacatttcaatataacctcrtatggctttatatcatttttgttttccctaatgttttcctccttgacatg

SEQ ID NO: 1454 - DNA, 101 bp, Homo sapiens
ctgagagaccccagtttcttctccaacccccaggacttcaatccccagcayttcctgaatgagaaggggcagtttaagaagagtgatgcttttgtgccctt

SEQ ID NO: 1455 - DNA, 101 bp, Homo sapiens
gtcatagctctggcatcgtctgggtctgaacgcagatggacctctacaggrtggttcccatcagcctgggcagaggagaagacaggaagaggtcaggggag

SEQ ID NO: 1456 - DNA, 101 bp, Homo sapiens
agaaatgtcctgtttcagtgactttccaatgcctgaagattttccaaactycctgcataattctaaacttctggaatatttcaggatttttgctaaaaaat

SEQ ID NO: 1457 - DNA, 101 bp, Homo sapiens
caaggtgaaatctacagtgaaagagctcacagaaacttctgccatctttgrggatggaacagtggaggagaacattgatgtcatcatttttgcaacaggat

SEQ ID NO: 1458 - DNA, 101 bp, Homo sapiens
actcagtgttccacacccggtttcgttctatgctccgcaatgtactgccaygaacagctgtaaaatggatgatagaacaacagatgaatcggtggttcaac

SEQ ID NO: 1459 - DNA, 101 bp, Homo sapiens
gtgctgtgtggatgagggacttgagcccacttgctttgagagaactgaagrtattggaggagtgtggaggttcaaagtaagtgagattttcttgggtcttg

SEQ ID NO: 1460 - DNA, 101 bp, Homo sapiens
gtgaagataatatttttaaaatttctctaatttgttttgttttgcaggctrtaggttccaggcttgctgtaattacccagaatatagcaaatcttgggaca

SEQ ID NO: 1461 - DNA, 101 bp, Homo sapiens
aagtggttgcctcttagactcagatgcagttctggactctggctagagttytgaatttgggaccagggtctctagttcccacgctgacatctctccctagc

SEQ ID NO: 1462 - DNA, 101 bp, Homo sapiens
aactgtagttgtgtggaagtaactggtctccagaacagaaattactcagcrcacttgggtgaatgcccaagagataatacttgtacaaggaaatttttcat

SEQ ID NO: 1463 - DNA, 101 bp, Homo sapiens
aagagggaaatattacacttccaataattgtctctgttttccatacagagycctgaggaaagagcctgtatttaacgatgagctcccagcaagcattctgt

SEQ ID NO: 1464 - DNA, 101 bp, Homo sapiens
gctgtgatattgccacagaactcagccgcacagcagaacaggtactactcsccgggtactcgggtgactctcgttactgacagaagagttattatcgtttg

SEQ ID NO: 1465 - DNA, 101 bp, Homo sapiens
tgacttgtacagcataatgaaaaacctaggcattgattttgaagacatcaracacatgcagaatgaaaaatttttcagaaatgatttttctggtgagrttg

SEQ ID NO: 1466 - DNA, 101 bp, Homo sapiens
atggtcctcattcatgtcagatgccattacagacaaggacatagtcttctwcaagaccctgaagccctggctgggtaagtaactgtaggtggacgggacgg

SEQ ID NO: 1467 - DNA, 101 bp, Homo sapiens
tcttgcacctcctgccggcagcgctcctggtattctgggtgctttgcaagrtggtacaggacccaggagagaccactggccgtggtgtcatggcctggggg

SEQ ID NO: 1468 - DNA, 101 bp, Homo sapiens
tggccctgggaggacgggcctcggaagcactgtccttcaacgaggtcactwctggtgaggagcagcggcgcgggccctggaggtttcagagcgcttttccc

SEQ ID NO: 1469 - DNA, 101 bp, Homo sapiens
gcgcctgcttttgcataagcagctagttctttgtcactaaatgccgagagwatctggacagaaaagaaacagtgatcacttttgtatagggagaaaagttt

SEQ ID NO: 1470 - DNA, 101 bp, Homo sapiens
agctctggctgccttccggattccactttgggctctaacgagacaccttaragaacaggctttaaaagatgctgcttccctgttttcttccaggaacacag

SEQ ID NO: 1471 - DNA, 101 bp, Homo sapiens
ttgttttctcttggatcaaggcaagcttggcatcttgttcctcaggttgastaaagggcagaagaaggatcatttcacccaaatctgctataccttctata

SEQ ID NO: 1472 - DNA, 101 bp, Homo sapiens
ttgtgctggcaaccaccattgcatttgcctactctttgattattcttctasttgcaatgtatgagagagccaaagtgaaccctattactttctttgacaca

SEQ ID NO: 1473 - DNA, 101 bp, Homo sapiens
cctcacccagaggatgcatccaggttcagcttcattccatttggaggaggscttaggagctgtgtaggcaaagaatttgcaaaaattcttctcaaaatatt

SEQ ID NO: 1474 - DNA, 101 bp, Homo sapiens
ctgataaatggagcaccgcgacctgccaatttcaaatgtaattcaggttaygtggtacaagtaagtattagtgggtttgcattttctgtttcctctgtttc

SEQ ID NO: 1475 - DNA, 101 bp, Homo sapiens
tccgtaaggggtcagcgctcttgctttgctcttttcaatgaatagcacttmtgttactggtgtccagctgagtttctcttgggtataaaggctaaaaggga

SEQ ID NO: 1476 - DNA, 101 bp, Homo sapiens
ctcaacttggggtcctgaattttgctccaggacttacaccagaggatcgayaagttccgtttcaccccacctttggaggacagctgcttccactatggctt

SEQ ID NO: 1477 - DNA, 101 bp, Homo sapiens
ggatgaaggtctatgtgcccactggcttctctgccttcccttttgagctaytgcacacgcctgaaaagtgggtgaggttcaagtacccaaagctcatctcc

SEQ ID NO: 1478 - DNA, 101 bp, Homo sapiens
gctaatgaactctttcaaattatatgctaattaaataatacaactcctatwcacccacttagttaaaattgatttcttctcattaggatctgatgtgaatt

SEQ ID NO: 1479 - DNA, 101 bp, Homo sapiens
ggctctggataaggtcagtgaggcttagttcaaaccaacctgatttataarcataagaacattctactactaattcttgttaatattggtcttagaaaagg

SEQ ID NO: 1480 - DNA, 101 bp, Homo sapiens
atccaaaattgtatttttaaacagatactatcttcatttactgataaagarctcttagcgtatgcaaaagctggagcagtagctgaagaggtcttggcagc

SEQ ID NO: 1481 - DNA, 101 bp, Homo sapiens
gtctcataaacagctttaaggtaataaaatcattttctgtgccacaggatrtgagttggtttgatgaccctaaaaacaccactggagcattgactaccagg

SEQ ID NO: 1482 - DNA, 101 bp, Homo sapiens
attgaaaaaacccctttgattgacagctacagcacggaaggcctaatgccrgtgagtttgatgtttcaactgtttgatctactcctgactcctgaatgaaa

SEQ ID NO: 1483 - DNA, 101 bp, Homo sapiens
cacatgtgcagctcagcccccctggcctcagggcgggcagatcgagttccrggactttgggctaagataccgacctgagctcccgctggctgtgcagggcg

SEQ ID NO: 1484 - DNA, 101 bp, Homo sapiens
tctctacagactgagtgtggtggccagaaacgcacctggaagctgagcccytggatgtccaccatgtctcccagccaggagagggcagcattgataaagtc

SEQ ID NO: 1485 - DNA, 101 bp, Homo sapiens
ggaaaaaatcccgaaacttggtgtcctttttaaccctgcgggccaaactcrtggggatcacgtctccaaatctttggatctcgtggatcactgcctccatg

SEQ ID NO: 1486 - DNA, 101 bp, Homo sapiens
cattctgtgtggcattgtgtccgtaaagcctaacgtgaaggaattcacagrgacctcggccatttttgaggatgggaccatatttgagggcattgactgtg

SEQ ID NO: 1487 - DNA, 101 bp, Homo sapiens
cttgagagcccaccaccttccatgtgtgtctggatgtttaaccttaccaarcagaagattctcgtcatatccttcagtttgagctcctttatttggcgttg

SEQ ID NO: 1488 - DNA, 101 bp, Homo sapiens
acaactggacttggtgggaaggactgggccccaggtggcttagttgctctsgccccagaccaggtctctctagagctctgggccatttgggttaagcttct

SEQ ID NO: 1489 - DNA, 101 bp, Homo sapiens
atgttttacttgctaagggttggaactgtctcctcctgggtgatgtggacrtggcatcaccacccagtaagttgtcaccttggaaagactccaggatggag

SEQ ID NO: 1490 - DNA, 101 bp, Homo sapiens
catcctttctccggaatgtccttccttcattcatctctgactggttatatrtccagaagatgaacacgtggtttaagcatgagaactatggcctgatgcct

SEQ ID NO: 1491 - DNA, 101 bp, Homo sapiens
acaaacacgatgattttgcttgcactgaaaaatgaagccaaattcatcccyctgaggcaggaacttctcagaatcttggaaatctccttcctgaaagagag

SEQ ID NO: 1492 - DNA, 101 bp, Homo sapiens
cacacttaccacctggtagtgattgggggcccacactagaagcgtgtggcrttggccctgcttgaagtcgtcagttacagcagtgactggtgatccaggag

SEQ ID NO: 1493 - DNA, 101 bp, Homo sapiens
agggccacataccaggatgataggaagaagacgaagaagggaatggacacwgttaactgcagccaacgccactgggggatggcgtaggccaggccgggcag

SEQ ID NO: 1494 - DNA, 101 bp, Homo sapiens
ggacagtcctggaatgatgttgtggtccaggaccatggactggtggggctygttgctgggtatcagcatatagatcattaaggccatgacagggatgccaa

SEQ ID NO: 1495 - DNA, 101 bp, Homo sapiens
gggatggccctgaggcttgagaaacctcctcagctttggccccagaagccstttcagcaggcggtggcccaggaaggtgaggaccacacaggtgaggacaa

SEQ ID NO: 1496 - DNA, 101 bp, Homo sapiens
ggtgattatctttggcatgggcaagcggaagtgtatcggtgagaccattgsccgctgggaggtctttctcttcctggctatcctgctgcaacgggtggaat

SEQ ID NO: 1497 - DNA, 101 bp, Homo sapiens
ggaattctttgtcattgtgcagcacagaagtcagggatgttattatggtcrtgccctgaaaatagcaaaacagacaaactaagttataaagaagtcaaaga

SEQ ID NO: 1498 - DNA, 101 bp, Homo sapiens
gtaaataattttaaataacctctggcccttggaataaagttctgttttctrtatttgcctggtattgtgtgagtagatctgggacctccacctgcatcaac

SEQ ID NO: 1499 - DNA, 101 bp, Homo sapiens
tcatcttagtggtgtcaagttgacccaaaatttaagtttaaaaaaaatatrtatataagtaaacaaaggagggaagggaaaaagggcccaaggagaccaaa

SEQ ID NO: 1500 - DNA, 101 bp, Homo sapiens
ttttcttttcttctttttgatttttagagtgtgtccaagtttacggactaygagctgaaggcctatgccaaagcaggggtggtggctgatgaagtcatttc

SEQ ID NO: 1501 - DNA, 101 bp, Homo sapiens
gaactttgctgttttctttcttctccagattctaaatgacctcaacatggycattaaaccaggggaaatgacagctctggtaggacccagtggagctggaa

SEQ ID NO: 1502 - DNA, 101 bp, Homo sapiens
actagcactcactgcgcaatgatgctttgagcaggcaaagaggagagcgaygaacacgcagattcctgcgaaggacaccagttgctcaggccgctgggagg

SEQ ID NO: 1503 - DNA, 101 bp, Homo sapiens
ggtaagaacgcagtgacaaggcatgccacccctgccactatattgcttgcygcaaaggggaggcgtcgtccaaggcgctcaatggttagtaagatcaagag

SEQ ID NO: 1504 - DNA, 101 bp, Homo sapiens
ttcgggaggtttcttggcctcactgagagggatgtggagctgctgtacccygtcaaggagaaggtattctacagcctgatgagggagagcggctacatgca

SEQ ID NO: 1505 - DNA, 101 bp, Homo sapiens
tttagaccctcacagaccagggtttgcagttttctgggacaccagtgacayactaggaaggaatgatagtgttctcattgccagggtctgctgatcatgct

SEQ ID NO: 1506 - DNA, 101 bp, Homo sapiens
tcagagataggctcttacctcatagattctttcagacaggcttttaaatayggcatattcctcaaatcttctgcccgtggcacctgattctcaggtaatac

SEQ ID NO: 1507 - DNA, 101 bp, Homo sapiens
agaaaagtggtccaatgacttcaggtggaaaggccacattgaggatggtgraacagagttggacattttggcatccagtctccatgctgacagtgcgtctg

SEQ ID NO: 1508 - DNA, 101 bp, Homo sapiens
gagggtgatgggggcagcagtgagcaccaactcacacgtgcacaggaaggytgtcgggggtgccatcatggttgtggtctgtgaggtcattaatggagctt

SEQ ID NO: 1509 - DNA, 101 bp, Homo sapiens
gaagagagaggtgccttccttcatccatctggactgcccttggaattcctrggccaatttggggaaccctggcaccaaccctaacatgggccagtgccagc

SEQ ID NO: 1510 - DNA, 101 bp, Homo sapiens
ctggtggcccaattctttaatgggacaaatattgtttcctatatatatgtrtatgttttatatatgtatgtatactcatatagatatattgtcattgaaat

SEQ ID NO: 1511 - DNA, 101 bp, Homo sapiens
gtggctgagccaggtgtgttgtgtcgtttcagcatcaccttctccatcccygaaggtgctttggtggccgtggtgggccaggtgggctgcggaaagtcgtc

SEQ ID NO: 1512 - DNA, 101 bp, Homo sapiens
gttggacatggtgttggccttcatggcgctgaaggttgagtgtgccacgayggagcccagtgcctccttgcccagcggacggcccaggaacccacagatgc

SEQ ID NO: 1513 - DNA, 101 bp, Homo sapiens
cagtggcaaagtccatacattcttccagtttctcttctgtggaaatcctgygtcttttttctgctatcagaacttctatggcatctttcaaatccttgctg

SEQ ID NO: 1514 - DNA, 101 bp, Homo sapiens
ggcctcgggcccgtggcagcatccccgtggctgcttctgctgctggttggrggctcctggctcctggcccgcgtcctggcctggacctacaccttctatga

SEQ ID NO: 1515 - DNA, 101 bp, Homo sapiens
gttcaaaggccaatatttccatagccgccaatacaagcatccagatggatytgagggaaaacgcatcctggtgattggaatgggaaactcaggctcagata

SEQ ID NO: 1516 - DNA, 101 bp, Homo sapiens
tgctgttcgtgaccatgggcatgcagacaggcttcagcttcctgcagatcytctcgaagaattttgagatgtttgtcgtgctgtttgtccttgtaggcatg

SEQ ID NO: 1517 - DNA, 101 bp, Homo sapiens
atggaaggctgtccttgctgctcatgcatggcagttaccaagatgctgatrgtctttcagcctctggaggacgtgagagggtgtgcatgtgtgtatgtgta

SEQ ID NO: 1518 - DNA, 101 bp, Homo sapiens
gcatctactatatactaggccctgaagatagagcgttgaacaaacccaatrgtcttggccctcaaaaagctttatgtgacatagagcatccagctcgacaa

SEQ ID NO: 1519 - DNA, 101 bp, Homo sapiens
tcttgggtgttctccgccaagctgatgctctcgagcgagtacaggccgacrgggaaggggacgcccttgtaccggaagtattcacctggcaacttctggct

SEQ ID NO: 1520 - DNA, 101 bp, Homo sapiens
tgagcagcaagaagccatagcgcagggtggtgctgaccgtctcggtgcctscaatgaagaggttcaacgtgctcatcatcaggttcttcaagtagaactcc

SEQ ID NO: 1521 - DNA, 101 bp, Homo sapiens
tcataagcaagatcataggctaggaagtggcagagccaggattcaacctcsgcgagcctggtggtgctctgacatccaccgaagcccccatcaagcccttt

SEQ ID NO: 1522 - DNA, 101 bp, Homo sapiens
agtcccctcagctggccaggacagtactctgctctcacctctctgcttctygggctccatcccagctccccatcaactgatcttcttgcaaacccacaggg

SEQ ID NO: 1523 - DNA, 101 bp, Homo sapiens
accactgtgctcttcccacagccactgctgcccaccagagccagcgtctgscccttcttcacctccaggctcagtccctgaagcactgggatgtccggtcg

SEQ ID NO: 1524 - DNA, 101 bp, Homo sapiens
acacctcctccccagaacagtactgcagctatgatataacgcctgggcagsgttcgcaatagcagccaggctgtaatgtaagctggaatttcaatcaaggc

SEQ ID NO: 1525 - DNA, 101 bp, Homo sapiens
tacagcacttcactccccaccagtgatgacaacagttgctgttctttgtcyactttatttacttgtttatctttaatgacaaaagttttttttttgttgtt

SEQ ID NO: 1526 - DNA, 101 bp, Homo sapiens
cagtgggcacatggggcacaaggtcacactcaccaccagagtgccacgcayagcacccccggcatcgtcagcgccaccagcagcatccgccagtctcggat

SEQ ID NO: 1527 - DNA, 101 bp, Homo sapiens
aatattctcagactaaacctgacatagggaacaccgagaatgaaaacatckttaacaccaaaactgaattcttatgcagaatttcctagcccatagatgac

SEQ ID NO: 1528 - DNA, 101 bp, Homo sapiens
cagctaaacaaaaaaagaaaaattacttaccatttgcgatcacctggattratggcaactaatgctcctctatcccaaatcatgtcaaatttgccaatatt

SEQ ID NO: 1529 - DNA, 101 bp, Homo sapiens
attgaattaattaatacgtgtatttgatgtatcaaacagtattactggtcrtggagtactggctgatggcaccaccagatttacatgcaagggcaaaccag

SEQ ID NO: 1530 - DNA, 101 bp, Homo sapiens
ctgccctatatggaggccttcatcctggagaccttccgacactcttccttmgtccccttcaccatcccccacaggtaaggccccatggagccactgctgtc

SEQ ID NO: 1531 - DNA, 101 bp, Homo sapiens
gccaggaggccccgaccagcaggaggagcagccaaggggatgctgccactsgccagaggcccagccaggacaggctcagctgggacatcctgcagggcaga

SEQ ID NO: 1532 - DNA, 101 bp, Homo sapiens
cgagccgcgcgctgtgctcgccgcccgcctgcagcgcctttccccgaggcrccatcagcaagcaggacgtatgcaagacactgtgcacgcggcagccattc

SEQ ID NO: 1533 - DNA, 101 bp, Homo sapiens
taaatatcaaacctctgcatctctgatcccttccttgttaaaagttaccasggttggccaggcacggtggttcatgcctgtaatcccagcactatgggagg

SEQ ID NO: 1534 - DNA, 101 bp, Homo sapiens
cctttgtcctcctccaaaaccctcctactctgtctggtccccagttgtacracatcttcccgagcctcctggactgggtgcctgggccgcaccaacgcatc

SEQ ID NO: 1535 - DNA, 101 bp, Homo sapiens
cccgtctgccctgcaggatgtcccagctgagcctgtcctggctgggcctckggccagtggcagcatccccttggctgctcctcctgctggtcggggcctcc

SEQ ID NO: 1536 - DNA, 101 bp, Homo sapiens
caggtcaaccccacagaggagggcatgagagttctgactcagctggtggcyacctacccccagggctttaaggtctggatgggacccatctcccccctcct

SEQ ID NO: 1537 - DNA, 101 bp, Homo sapiens
ctctgtccccttctctggctaggccaagtggcagctcctggcctcagaggktagtgcctgtttggatatgtttgagcacatcagcctcatgaccttggaca

SEQ ID NO: 1538 - DNA, 101 bp, Homo sapiens
ataatatttgtgatttaggttggaactcagtttatccgtggtgtgtctggrggagaaagaaaaaggactagtataggaatggagcttatcactgatccttc

SEQ ID NO: 1539 - DNA, 101 bp, Homo sapiens
cctttagtttctggaagcaacagcaccagacctccagcaaccaagccaagyacgcctgaaagccaaacagatgaatatcacattaagaactgaaaaactca

SEQ ID NO: 1540 - DNA, 101 bp, Homo sapiens
gaagcggactgagtgctgggatccaaggcattctacagggttcactgctgrtttacacttcacctgtgtcagcaccatcttcaggtgcttagaatggcctg

SEQ ID NO: 1541 - DNA, 101 bp, Homo sapiens
gacaaccagatcaaagctagaaaatgagattccttagcctggatttccttytaacatgttatcaaatctgggtatctttccaggcttccctgacttgcttt

SEQ ID NO: 1542 - DNA, 101 bp, Homo sapiens
ttggggcctacagcatggatgtgatcactagcacatcatttggagtgaacrtcgactctctcaacaatccacaagacccctttgtggaaaacaccaagaag

SEQ ID NO: 1543 - DNA, 101 bp, Homo sapiens
aagctgagccgggctgacattcatctggtggaacttctctactacgtcgargagcttgactccagtcttatctccagcttccctctgctgaaggtgaccca

SEQ ID NO: 1544 - DNA, 101 bp, Homo sapiens
cgcagttcagcccagctgaggcctgtctgcagaatcgacaccaaccagcaycatgtccatgacactggggtactgggacatccgcggggtgagtgagggtc

SEQ ID NO: 1545 - DNA, 101 bp, Homo sapiens
ttttctgcctcaggagaaactgaagccagaatacttggaggaacttcctamaatgatgcagcacttctcacagttcctggggaagaggccatggtttgttg

SEQ ID NO: 1546 - DNA, 101 bp, Homo sapiens
gttcctcactgcggggaccagcaaaggccttctcactgggttggtcaaagrtagtcaccttggcctggtgcatccacagaggatgttgttcaaaccagaaa

SEQ ID NO: 1547 - DNA, 101 bp, Homo sapiens
agggcctcccgcacagcctcctgcccaaccaggaccaccacaggccgccasggtcccaggtagatggtgaacaccggtccgtacttcttactcagctgggg

SEQ ID NO: 1548 - DNA, 101 bp, Homo sapiens
ctcactcggggcacagcagtcagcactgggcgttctgcttgcaggtggccytgtgcacatttgccgtctacgtgaccattgacgagaacaacatcctggat

SEQ ID NO: 1549 - DNA, 101 bp, Homo sapiens
tttggacttatactcaaggtattatgatgttatagactgggagactaggaygcactttccagaataatggggattaaaacaatccttttgtactcaagtca

SEQ ID NO: 1550 - DNA, 101 bp, Homo sapiens
tctcactaattcccacatattaatcaggactggctcctgcacagagaagcmctgagtggtggctgagctgccacttgacattgggttttccctcacatgga

SEQ ID NO: 1551 - DNA, 101 bp, Homo sapiens
tccctttgtcacgacccctccatcagatggcccctgagttctgcagcctcraggaaggcctgccctatctggacatggtgattgcagagacgctgaggatg

SEQ ID NO: 1552 - DNA, 101 bp, Homo sapiens
cacaacatcaatgttttcttccactgtcccatcttcaaagacagcagaggwttctgtaaattcaatcacgctggttttcatagtgattgccccacagagga

SEQ ID NO: 1553 - DNA, 101 bp, Homo sapiens
tttgccacttgaagatgggtggtgggggccaggcacgaggtccgcagccasggaggacgacagcatccgccctttcaaggtggaaacgtcagatgaggaga

SEQ ID NO: 1554 - DNA, 101 bp, Homo sapiens
aaagctgttctctcttctcatggttatggaggctgcatcttcggggatctsttccacactggatatcagcccatagtcatcgtcttcttcttcactgccat

SEQ ID NO: 1555 - DNA, 101 bp, Homo sapiens
ccaaagtaaaaaaaagtacaatgtggtttacatagtccaaaaactagtggmaaatgccttcggaacggacttgacattttggttggattcacagtgctgtc

SEQ ID NO: 1556 - DNA, 101 bp, Homo sapiens
ctctttgccaatggaaaccgctggaaggtgcttcggcgattctctgtgacyaccatgagggacttcgggatgggaaagcggagtgtggaggagcggattca

SEQ ID NO: 1557 - DNA, 101 bp, Homo sapiens
gagattgctcctggcatcatcagaaaatacaggaggaaccggacagagacscgggggatccagtttgaagatttcgtgcgctacctcggcgatccgaacca

SEQ ID NO: 1558 - DNA, 101 bp, Homo sapiens
tgcgctacctcggcgatccgaaccacagatggctagaccttcagtttgggraccacatcattcactgggtgacgtatgtagagctctgtgctccctgtgag

SEQ ID NO: 1559 - DNA, 101 bp, Homo sapiens
gagataatgtacagtgtgattggacaccacgagaccctggaggacgatgcyccatacatcttaaaagaggctggcattgaccacctggtgtcatacccgac

SEQ ID NO: 1560 - DNA, 101 bp, Homo sapiens
acagagtcatgattagtcttattcacagtggaaaaattagtttatagaggktacaggctgagaattccaggatatagacactcgattcagcatgaagttta

SEQ ID NO: 1561 - DNA, 101 bp, Homo sapiens
cagaatatagctaaccttggaactggtattatcatatcatttatctacggktggcagttaaccctattgctattagcagttgttccaattattgctgtgtc

SEQ ID NO: 1562 - DNA, 101 bp, Homo sapiens
ttgtggctgggtcctaccttccccctcctcattttatgccaccctgacatyatccggcctatcaccagtgcctcaggtacccgtgcagagcttgtggtagt

SEQ ID NO: 1563 - DNA, 101 bp, Homo sapiens
attttaggtgactgaaattgcatcagtgatcataatgaggtttgttaaaaygatagctatattcaaaatgtctatatgtttatttggacttttgaggttaa

SEQ ID NO: 1564 - DNA, 101 bp, Homo sapiens
tatatattattagaccatgttttcttccactggcaaattattttttttatyagatgagatgttgggaaacccatacatcagatgctggaggacatggctgc

SEQ ID NO: 1565 - DNA, 101 bp, Homo sapiens
ttcgggtggagtgggcaactttagggacccgggccctcatgcccatcccaygccccaattactgcccagtgccctcagggatcagccctcagattcggcta

SEQ ID NO: 1566 - DNA, 101 bp, Homo sapiens
atgtcaggacaagtgaccacaggggcctttttattctaccctgcaggaccstattccagggtgacaactttcagagagctcagggcatgctcgagctgcct

SEQ ID NO: 1567 - DNA, 101 bp, Homo sapiens
tgaaaagcagaatccctcacccctctactggaagagctaagttgagttccygttcccataatgcttgggtgcaccagcagaatctgaactcagaacatgca

SEQ ID NO: 1568 - DNA, 101 bp, Homo sapiens
cgacttcagaaagcctgtggcgatgccatgaatttgctgggctaccgccamgtcagatctgaacaagaacagagaaacctgttgctggatcttctgtctac

SEQ ID NO: 1569 - DNA, 101 bp, Homo sapiens
tggcgatggcaaagcgcaggagctgcttggcgcgctccccgttgctgaacrccacgcctggggaggtcaaggcgggggtggagagaggtcagggggcggcg

SEQ ID NO: 1570 - DNA, 101 bp, Homo sapiens
ttcagtctgtgtccttgacctgctgcttcttcctaggggccctcatggacsccaccttcctcttccagtccattaccgccaacatcatctgctccatcgtc

SEQ ID NO: 1571 - DNA, 101 bp, Homo sapiens
gcctggatccacaacatcacccacgggtcggggatcggcaagccaatcgargccttccatacttcgtctaggaatgcgcgcaacgtctcccaggcctggcg

SEQ ID NO: 1572 - DNA, 101 bp, Homo sapiens
ttcgtaattaaaggaacagagtgagagacatcatcaagtggagagaaatcrtagtttaaactgcattataaattttataacagaattaaagtagattttaa

SEQ ID NO: 1573 - DNA, 101 bp, Homo sapiens
gaccgtgagcaccaccctgcgctacggtttcctgctgctcatgaagcaccyagaggtggagggtaagactggaaagggaggaaagtgaagggccccagacc

SEQ ID NO: 1574 - DNA, 100 bp, Homo sapiens
cccagctctatgagatgttctcttcggtgatgaaacacctgccaggaccrcagcaacaggcctttcagttgctgcaagggctggaggacttcatagccaa

SEQ ID NO: 1575 - DNA, 101 bp, Homo sapiens
gcatattggtgtcaaagtgtcactgaactaaaggctgactttccagacaaygtaagtgtgatttaacatctaaaacaagagaattggcataagttggtgaa

SEQ ID NO: 1576 - DNA, 101 bp, Homo sapiens
ctctcctctgagctgtaataaataaaatggtagtaatgaatgcaatcagtrttagccaaaataaagaatttatgagtcattgctcattgtcttgttgtgag

SEQ ID NO: 1577 - DNA, 100 bp, Homo sapiens
  misc_feature (82)..(82): n is a, c, g, or t
gattgcatctctatcttgagaataccatcattccagtttccttggaagtraaccaaggagagataaataacattaatatttngacaatcaaaagagtatt

SEQ ID NO: 1578 - DNA, 101 bp, Homo sapiens
ctggtgcctactaagtgcctgacaaatagcaggcacccaatacaagtttaytgaattaatgacagaataagtatcaaaaacatcttgaagaaatcagagct

SEQ ID NO: 1579 - DNA, 101 bp, Homo sapiens
gccctcgcctcctgcaatgagagctatggggtctgtgtggttgttggggtrttgcctgccagtgttcaactcaaaatcagtggccagttgttcttctcagg

SEQ ID NO: 1580 - DNA, 101 bp, Homo sapiens
tctggttcttcccaaatatgaaaggataatgcagaagtacaacctgctgcyagagaagtccatgtatgatttggttcatgggtccagcctgtggatgctgt

SEQ ID NO: 1581 - DNA, 101 bp, Homo sapiens
aagaatttatccagagctcaggtaaaaatggtgttgtggtgttttctctgrgatcaatggtcaaaaaccttacagaagaaaaggccaatcttattgcctca

SEQ ID NO: 1582 - DNA, 101 bp, Homo sapiens
attgggttcttgctggtctgtgtgacaacggctatatttttggtcatacartgttgtttgttttcctgtcaaaaatttggtaagataggaaagaagaaaaa

SEQ ID NO: 1583 - DNA, 101 bp, Homo sapiens
gacatgaaatagttgtcctagcacctgacgcctcgttgtacatcagagacrgagcattttacaccttgaagacgtaccctgtgccattccaaagggaggat

SEQ ID NO: 1584 - DNA, 101 bp, Homo sapiens
gtggcttcctcccggcagctgaagcgcctcgagtcggtcagccgctccccrgtctattcccatttcaacgagaccttgctgggggtcagcgtcattcgagc

SEQ ID NO: 1585 - DNA, 101 bp, Homo sapiens
caccctgggtgactgataagaggcctccgccagattggcccagcaaaggcmagatccagtttaacaactaccaagtgcggtaccgacctgagctggatctg

SEQ ID NO: 1586 - DNA, 101 bp, Homo sapiens
aatgatgccatggcagacagtagacagaacaacacttccctgaggctgggygtctatgctgctttaggaattctgcaaggtgagcttgtgggggtgtccag

SEQ ID NO: 1587 - DNA, 101 bp, Homo sapiens
gtgccttaagagactacagagtcaaagctcatttttaaaggagtaggacaragttgtcacaggtttttgttgttgtttttattgcccccaaaattacatgt

SEQ ID NO: 1588 - DNA, 101 bp, Homo sapiens
agtctcatgacctctcagaataaggtgtcacctccctgaaattgcatataygtatatagacatgcacacgtgtgcatttgtttgtatacatatatttgtcc

SEQ ID NO: 1589 - DNA, 101 bp, Homo sapiens
tactcatttcttcattgtcccggttttcaaaaatatagatgcaaaaaaaaatgagctgtggatgcatgtttagaggggagaaagtttgtttctaggatcta

SEQ ID NO: 1590 - DNA, 100 bp, Homo sapiens
tactcatttcttcattgtcccggttttcaaaaatatagatgcaaaaaaaatgagctgtggatgcatgtttagaggggagaaagtttgtttctaggatcta

SEQ ID NO: 1591 - DNA, 101 bp, Homo sapiens
ggaattgacaaggggacacagaaggaaagtaaagagaataggttagtggaytagtattcctgtgcttaatggaggacagattactacaaatgaccctggaa

SEQ ID NO: 1592 - DNA, 101 bp, Homo sapiens
agattatttcttgaaccaaattgttctttcgtttggctactttgattaaaraagaaagaagagataataattgcaatgattcttttattttattttatagg

SEQ ID NO: 1593 - DNA, 101 bp, Homo sapiens
atagcccagccaggcgtgctactcatttttggcacaatgacagatgttttyattgactacgacgttgagttacaagaactccagattccaggaaaagcatg

SEQ ID NO: 1594 - DNA, 101 bp, Homo sapiens
ggaaaggtgagattcacaccagggtccacccagcatctctacttataccaygctctgctttaaggttctctgagaactcagacaagccttgggctaacaat

SEQ ID NO: 1595 - DNA, 101 bp, Homo sapiens
agaagaaagtcatactcaaataggtggtaggagcagagacaattcaatacrgacagaagtcttagatgagagcagtgagccagggcactggactgggactc

SEQ ID NO: 1596 - DNA, 101 bp, Homo sapiens
ccagttggttgctgtggttacagccagtgcctggaattcctccttagggcyctgggaagagtattgcttaacgcaggatgtgctgggtgttttgtttcggg

SEQ ID NO: 1597 - DNA, 101 bp, Homo sapiens
tgggtgttttgtttcgggcttttatttatggcttggtgtctttcttgtttyatggctgtgtttttgcttttgtttctgtaggagcgcctcttccaagcagt

SEQ ID NO: 1598 - DNA, 101 bp, Homo sapiens
gctctgcttctggtttcctggacaatttctctgtcagatacggcccattgyaaacccagagggctgcattttgggttgagtaatatggacaccatggaagt

SEQ ID NO: 1599 - DNA, 101 bp, Homo sapiens
cagccacctccatccaaggctcttcctaggggccctgctaatgtggacagyagactttatccctccttcttactctgggccaagacctcccactccgccct

SEQ ID NO: 1600 - DNA, 101 bp, Homo sapiens
accgagttattttccaaaagctgaggaacataaagcaaatttaggcttttrtccttctgcaatacatgcacttgaaaataaacagaaaagagatgtttaat

SEQ ID NO: 1601 - DNA, 101 bp, Homo sapiens
tgttcatgggtaatatgcttcgtggaataggggagactcccatagtaccaytggggctttcttacattgatgatttcgctaaagaaggacattcttctttg

SEQ ID NO: 1602 - DNA, 101 bp, Homo sapiens
gccaaattttcatttcttacttcgatgatatccttcttgtttcaacttctrtatttccctctaatctgcgaaagcaaatcagttgccggcctaaccttgac

SEQ ID NO: 1603 - DNA, 101 bp, Homo sapiens
aacctgctgcagatcttcacagccgccacccctgtccaccactgtcgcccrccccacaatgcctccacagggccttgggtgctccccatgggcccaaatgg

SEQ ID NO: 1604 - DNA, 101 bp, Homo sapiens
gcctttgaggagccggagctgctcgcccaggacatccgcaagttcctgtcsgtgctggagcggcaatgacccacccctctccccccgcctgccacctcccc

SEQ ID NO: 1605 - DNA, 101 bp, Homo sapiens
agccaacctgccttcctttccgtttacttcccaggagcattttcttccatygaggagatccccgaaaacgtggtgcacgaccacgagaagaacggccttcc

SEQ ID NO: 1606 - DNA, 101 bp, Homo sapiens
acaagacatacgattttagaaggtgaggggaggggaggctttttctacctragaaggggagtgtctttgagggccttaaaaggaccatggcccaggaatgg

SEQ ID NO: 1607 - DNA, 101 bp, Homo sapiens
aggaaaatcttctactcaattctgagagatctactaggctcttaacaaagmccagtcattcacaaggaggggatcaagctttaagtaagtccacagggtca

SEQ ID NO: 1608 - DNA, 101 bp, Homo sapiens
gcctgcagtgacccacccacctacctttgcatcacctacctttgcaccaaytaccttttcagatttccggtaataaatctgtgttggcccctgtgcctcag

SEQ ID NO: 1609 - DNA, 101 bp, Homo sapiens
gacgctgccaaggctcctaatctgacacttctttcatgtggaccagggatytgaactgtgtttcttccaaacttttggagcttgcttccttggtggtaagc

SEQ ID NO: 1610 - DNA, 101 bp, Homo sapiens
atgagtaaagagcctgcaggggagaaactgccactagtggagaccatgcgmgtgggcagccgattgcttggctctgggggtgggtgccagaggcatgcagg

SEQ ID NO: 1611 - DNA, 101 bp, Homo sapiens
ttgacagctccccaaggagggcggacagcagggaggacttccctgcccccrctggaccgacaacagccagcagacagccctggggcaccgtgaggtttatt

SEQ ID NO: 1612 - DNA, 101 bp, Homo sapiens
cacacggcctcgctgctgatggcgcctcggggaaaggcactgcaggcgggyggcgagcacagtgcacggctcacggcccactggaagaggtcggacaggtt

SEQ ID NO: 1613 - DNA, 101 bp, Homo sapiens
gtggtcagggactgatccttgaggaactgatgtacattaaacaaactatcmagtccctgcaatgcagtgtaaatgagtaaagagcctgcaggggagaaact

SEQ ID NO: 1614 - DNA, 101 bp, Homo sapiens
ccgtcgggtccatgttctaccgaattcagctcagggatccaggctgggcaracaatcataggaaacagcatattcttgaacttcatctcaatgcctagaga

SEQ ID NO: 1615 - DNA, 101 bp, Homo sapiens
gggaggcagctcaggactgcgaggtgctggggcagcgcatccccgcaggcrctgtgctagagatggccgtgggtgccctgcaccatgaccctgagcactgg

SEQ ID NO: 1616 - DNA, 101 bp, Homo sapiens
gagagccgcccgggtccccaggacagtgctgccctttgaagccatgccccrgcgtccaggcaacaggtggctgaggctgctgcagatctggagggagcagg

SEQ ID NO: 1617 - DNA, 101 bp, Homo sapiens
ctggacaggtgacaactgtatccagaaaatctaccaggaactggccttcarccgccctcaacactacacaggcatcgtggcggagctcctgttgaaggcgg

SEQ ID NO: 1618 - DNA, 101 bp, Homo sapiens
aaccgccctcaacactacacaggcatcgtggcggagctcctgttgaaggcrgaactgtcactagaagccatcaaggccaactctatggaactcactgcagg

SEQ ID NO: 1619 - DNA, 101 bp, Homo sapiens
cgaggcctgagcggtataatccccagcgctggctagacatcaggggctccrgcaggaacttccaccacgtgccctttggctttggcatgcgccagtgcctc

SEQ ID NO: 1620 - DNA, 101 bp, Homo sapiens
tgctctgctgcctctgggtggcctcagccacactgggaacgactgtctatwaccctgggaactcgaagtgttccatgctcactcgggaagcactgataacc

SEQ ID NO: 1621 - DNA, 101 bp, Homo sapiens
aggaagaacgttctcttcgcaaccatggctgtacagactggcttcagcttyctgcagattttctccatcagctgggagatgttcactgtgttatttgtcat

SEQ ID NO: 1622 - DNA, 101 bp, Homo sapiens
cctaagggagttactccatgaaagcagcttagaataatgcctggcacacaraggtgctgtgcactgtttgattcacacggaagctgggtaggctccatgga

SEQ ID NO: 1623 - DNA, 101 bp, Homo sapiens
gcattttataggcatacctcctatgggttgtcaccaagctaggtgctattkgtcatctgctcctgttcacaccagagaaccaggctacaagagaaaaagca

SEQ ID NO: 1624 - DNA, 101 bp, Homo sapiens
aggaaacaataccatgaatatatctcttcctggagagatggtgacacttgscccaatgtctcaagtaagtagaaggaaattgctgccttctttttcatctt

SEQ ID NO: 1625 - DNA, 101 bp, Homo sapiens
aatgccagatagtgatgagtggtgttcgcaggtgtgtgccggagtcccctsggtggctgttatcacaaaaaagaaacactgaagcaataaagataatggac

SEQ ID NO: 1626 - DNA, 101 bp, Homo sapiens
tcccgcctcggggtcgccaggccctgaaccccaacgccggcattagtcgckcctgcgcacggccctgtggagccgcggaggcaagggacggagaacggggc

SEQ ID NO: 1627 - DNA, 101 bp, Homo sapiens
tcgtattctcttccattcttcatcttcagcaaaacttaaggcacttttcaraaatcccattggacctaaaggcttgagttcaaagcagaagcagtttgtcc

SEQ ID NO: 1628 - DNA, 101 bp, Homo sapiens
tccctacattcgcccgcggctgcacccaggacgtggtgctcccagacagcygagtcatccccaaaggtgccctccatggcaggggaggagggtcctgggca

SEQ ID NO: 1629 - DNA, 101 bp, Homo sapiens
tctcccatacctaaaatattcactatacagctctttgcagaaaatgtcaayccctgtactgtgagatcagttcagggcagcctgaggcccaggaagaaatc

SEQ ID NO: 1630 - DNA, 101 bp, Homo sapiens
gaggttcccctccatggccttcttcagcccatgaggaagtccaaccccccyggcccgctgtttctttccatttcacccctcttggtctccccagtgggact

SEQ ID NO: 1631 - DNA, 101 bp, Homo sapiens
tatgcctctccaaccactgtattttggaagcacataacatgtttgatttcmtaggttcgcagcaagaacagttggactcaggataaattgtaccttgagtc

SEQ ID NO: 1632 - DNA, 101 bp, Homo sapiens
aggctgggggtggcagggctggatagggaggggcactgcccaagactgggrtggctccagggagctggccctggtgatgggtgcttgcaggtaaccagagg

SEQ ID NO: 1633 - DNA, 101 bp, Homo sapiens
ggctgcctggatgcgttccccctgctctcagcatatgtggggcgcctcagygcccggcccaagctcaaggccttcctggcctcccctgagtacgtgaacct

SEQ ID NO: 1634 - DNA, 101 bp, Homo sapiens
cgcctctacgcaccggtagtaaacatatcccggttactcgacaaacccatyacctttccagatggacgctccttacctgcaggtcttaaaacttttttttt

SEQ ID NO: 1635 - DNA, 101 bp, Homo sapiens
agagaactgtctttcatttttgaaccctcggtgtacacagaggcgggtctrtaacaggcaatcaacaaacgtttcttgagctagaccaaggtcagatttga

SEQ ID NO: 1636 - DNA, 101 bp, Homo sapiens
gattaccgtggcatcctctacagactcctgggagacagcaagatgtccttygaggacatcaaggccaacgtcacagagatgctggcaggaggggtggacac

SEQ ID NO: 1637 - DNA, 101 bp, Homo sapiens
cttccactatggcttcaactccaactacctgaagaaagtcatctcctactrgcggaatgaatttgactggaagaagcaggtggagattctcaacagatacc

SEQ ID NO: 1638 - DNA, 101 bp, Homo sapiens
agattcaattataaggacaatacagatctaatagagttcaagactctgagygaggaagaaatagaaaaagtgctgaaaaatatatttaatatttccttgca

SEQ ID NO: 1639 - DNA, 101 bp, Homo sapiens
tagaaagcttttaatgttggtttattgttgaattcctagaaaagttttatkggtagatgagtaaataaaatattgtaaaaaaacttattgtctataaagta

SEQ ID NO: 1640 - DNA, 101 bp, Homo sapiens
tggttcaccttctcctgcaggtgaccattgacggcaggaattacattgtcratgctgggtctggaagctcctcccagatgtggcagcctctagaattaatt

SEQ ID NO: 1641 - DNA, 101 bp, Homo sapiens
taggagagtttgcttacacttacgctgccatgtatgacaaaggacccttcygggtaggtggatggttctgaatgctctgacagccagcttctgggtggtct

SEQ ID NO: 1642 - DNA, 101 bp, Homo sapiens
tggactttccctacctaagggccacatcygggacatcacagacagcctgaytgagcactgtcaggagaagcagctggatgagaacgccaatgtccagctgt

SEQ ID NO: 1643 - DNA, 100 bp, Homo sapiens
ggaggagaagaaccccaacacggagttctacttgaaaaacctggtgatgascacgttgaacctcttcattggggcaccgagaccgtcagcaccaccctgc

SEQ ID NO: 1644 - DNA, 101 bp, Homo sapiens
caggcctcgggaacaaggcggggttgcgacccagagagtagaggaacacgygcaccaatgtctgcggacggtgcagagcggggatcagggaatgactgggg

SEQ ID NO: 1645 - DNA, 101 bp, Homo sapiens
cgctcaggcctcgggaacaaggcggggttgcgacccagagagtagaggaamacgcgcaccaatgtctgcggacggtgcagagcggggatcagggaatgact

SEQ ID NO: 1646 - DNA, 101 bp, Homo sapiens
tctagccagcgctgggggttatagcgctcaggcctcgggaacaaggcgggrttgcgacccagagagtagaggaacacgcgcaccaatgtctgcggacggtg

SEQ ID NO: 1647 - DNA, 101 bp, Homo sapiens
gacagtctggctgggtacactctcaaactgggtgcttcctctccctgcacrggagcactggggagtggccagttcaggaggggtcaactctctctgctggg

SEQ ID NO: 1648 - DNA, 101 bp, Homo sapiens
acacgtccctcgagactcagttgtatcacttgaaaatggggatgtcaggayaagtgaccacaggggcctttttattctaccctgcaggaccctattccagg

SEQ ID NO: 1649 - DNA, 101 bp, Homo sapiens
gaggatgggggcatcacctcaaagcgggagatgaagtccttcagatttggraaggcgtccaagcagttgggctcaaatatacggtggaggtcaaggacatc

SEQ ID NO: 1650 - DNA, 101 bp, Homo sapiens
gcaacaggtggctgaggctgctgcagatctggagggagcagggttatgagsacctgcacctggaagtacaccagaccttccaggaactagggcccattttc

SEQ ID NO: 1651 - DNA, 101 bp, Homo sapiens
ccggataggcgacaactgtatccagaaaatctatcaggaactggccttcarccgccctcaacagtacaccagcatcgtggcggagctcctgttgaatgcgg

SEQ ID NO: 1652 - DNA, 101 bp, Homo sapiens
catgcacagcttcctgagtcacccctctgtctaaccagccccagcacaaayggaactcccgagggcctctaggaccagggtttgccaggctaagcagcaat

SEQ ID NO: 1653 - DNA, 101 bp, Homo sapiens
gcagactgtcagagtcattaagcgggatcccagcatctcagagtccagtcmagttccctcctgcagcctgacccctaggcagctcgagcatgccctgagct

SEQ ID NO: 1654 - DNA, 101 bp, Homo sapiens
acaactgagtctcgagggacgtgtgttccccagctgatcgtgtcagcctcrtgccccaggcctcatctttcatggaccaggccttgttccaggagtgggtg

SEQ ID NO: 1655 - DNA, 101 bp, Homo sapiens
cctccccagtcattccctgatccctgctctgcaccgtccgcagacattggwacaggttttcctctactcgctgggtcgcaatgccgccttgttcccgaggc

SEQ ID NO: 1656 - DNA, 101 bp, Homo sapiens
gggggcaggtatgtcaccgttctcctggacccacactcctacgacgcggtkgtgtgggagcctcgcaccaggctcgacttccatgcctatgccatcttcct

SEQ ID NO: 1657 - DNA, 101 bp, Homo sapiens
aagcaggcagtggctggcacgagatgggtctcctcgacttctcctacagcytcctgctcaggtgaggctgtgcagcccccaccctcctgctggggcccggc

SEQ ID NO: 1658 - DNA, 101 bp, Homo sapiens
tgtgctctgtccctgcaggggacaaggaccacatgtgcagtgtcaaaagtygcctgtggaagctgctatccccagccaggctggccaggcgggcccaccgg

SEQ ID NO: 1659 - DNA, 101 bp, Homo sapiens
tcatcacccgcgaggttgtggtggacctggccatgcccatggcagacgggmgagaattcaacctgcgacgtggtgaccgcctcctcctcttccccttcctg

SEQ ID NO: 1660 - DNA, 101 bp, Homo sapiens
cactcggcaatgagcatcccctggggccccccaaagccccggaaggccgtkttggagggaaggttggttttgcacagccgcccagtgccccggatgttggg

SEQ ID NO: 1661 - DNA, 101 bp, Homo sapiens
agcctcgaggaaggcctgccctatctggacatggtgattgcagagacgctraggatgtacccgccagctttcaggtgtgtggtagccccctcccctgcccg

SEQ ID NO: 1662 - DNA, 101 bp, Homo sapiens
gttctgggccagccctgaccacacggacctgcaggttcacggctgaggccmggcagcagcaccggcccttcacgtacctgcccttcggggccggcccacgg

SEQ ID NO: 1663 - DNA, 101 bp, Homo sapiens
tgcccaataagaaccgagacgaactgaatggcttttttaacaaactcattrggaatgtgattgccttgcgggaccagcaagctgccgaagaggtaacgtat

SEQ ID NO: 1664 - DNA, 101 bp, Homo sapiens
cttctccctatgtttgttattttcaggaaaacggatttgtgtgggagagggcctggcccgcatggagctgtttttattcctgaccttcattttacagaact

SEQ ID NO: 1665 - DNA, 100 bp, Homo sapiens
cttctccctatgtttgttattttcaggaaaacggatttgtgtgggagaggcctggcccgcatggagctgtttttattcctgaccttcattttacagaact

SEQ ID NO: 1666 - DNA, 101 bp, Homo sapiens
caaatctactcacacaggttgtgcttgcgggcaatgtaccgcaggatggcrttgctctgggtgatcttgtgagtcccatcaatcaagtagggcagctggat

SEQ ID NO: 1667 - DNA, 101 bp, Homo sapiens
aagaagcagcatttcttttgttacctttcctctttggtaagacgtgccagytttctggctttgtgggccaggataaatctaaagaatataaacaagaaaaa

SEQ ID NO: 1668 - DNA, 101 bp, Homo sapiens
tttcatgcttttgtttcctgcctcaggactcttctccacagagagctccakgcactcacagaagccatgtataccaacctccatgcagtgctgttgggcga

SEQ ID NO: 1669 - DNA, 101 bp, Homo sapiens
caaggttttgtaaggtatagaatatacaaattctacttactcctttgggtraagcatattcacccagaactgttgccttgtcaagagtccgagttgtaaat

SEQ ID NO: 1670 - DNA, 101 bp, Homo sapiens
ggtgtcagggtggcataaaacgatgaaggggatgatgggacccagccataycgtaaagccctgggaataggtggccgacatctgggtcgagttcttcaagc

SEQ ID NO: 1671 - DNA, 101 bp, Homo sapiens
ttgttatccattatcagatggttcccctcatcagccaagcctgcgaccttmtcctggctcatttaaaacgctatgcggaatctggggacgcatttgacatc

SEQ ID NO: 1672 - DNA, 101 bp, Homo sapiens
ccgtcagaaatggctcctcagcctcttcctctccctgcagccatcactaaygtcatttttggggagcgccaggggatgctggaggaagtagtgaaccccga

SEQ ID NO: 1673 - DNA, 101 bp, Homo sapiens
gccagctggtggtggccgacaatcactgtagtcttggtgcccatacgaacmgaatagatggggccatattttttctgcagcttgaagaagttgttatgcat

SEQ ID NO: 1674 - DNA, 101 bp, Homo sapiens
atttttagatgagattgttttatcatgacatgttatatattttttgtaggkgtcaaagaaatgctgatggataacctatatgatttatagtttgtacatgc

SEQ ID NO: 1675 - DNA, 101 bp, Homo sapiens
attaactcctggtagagaagaaaaccccagcagtgtgcttgctcaggagargggagatgtgatggacttctataaaaccctaagaggaggagctactgtga

SEQ ID NO: 1676 - DNA, 101 bp, Homo sapiens
taaatagtgcagaatctcataggttgccaataatacactaattcctttctrtcctacaacaagagtttatttccaaataaaatgaggacatgtttttgttt

SEQ ID NO: 1677 - DNA, 101 bp, Homo sapiens
tcagaagcctatttttaatgtcattccaccaattcccgttggttccgaaarttggaataggtgccaaggatctggagatgacaacttgacttctctgggga

SEQ ID NO: 1678 - DNA, 101 bp, Homo sapiens
tcaccaattggttaatctttcctgatggtacaggaaagctcagctactgayttttgtgatttagaactgtatgtcagacatccatgtttgtaaaactacac

SEQ ID NO: 1679 - DNA, 101 bp, Homo sapiens
gctgctggtggtgctgctgctgcttctgaggcactggggctggggcctgtsccttatcggctggaacgagttcatcctgcagcccatccacaacctgctca

SEQ ID NO: 1680 - DNA, 101 bp, Homo sapiens
gatgtccctgcacagcccatcaccaccacctttttggagagacatttgccytccgtgccaggcctgctcaggctgattggattgaccaccatcttttcagc

SEQ ID NO: 1681 - DNA, 101 bp, Homo sapiens
cagggttatgaggacctgcacctggaagtacaccagaccttccaggaactrgggcccattttcaggtaaagccctccctggccctcgctgggaacacccag

SEQ ID NO: 1682 - DNA, 101 bp, Homo sapiens
cttccgcctcaagtcctcccagtcacctaaggacattgacgtgtcccccaracacgtgggctttgccacgatcccacgaaactacaccatgagcttcctgc

SEQ ID NO: 1683 - DNA, 101 bp, Homo sapiens
ggtgttggtggtgcccattgatggcagccactggctcagcatgcgggaggycttgcgggagctccatgccagaggccaccaggcagtggtcctcaccccag

SEQ ID NO: 1684 - DNA, 101 bp, Homo sapiens
cagcctttccaagtgcggctgcagccccgggggatgggggcccacagcccrggccagaaccagtgatggggcaggaccgatgccagccgggtacctcagtt

SEQ ID NO: 1685 - DNA, 101 bp, Homo sapiens
ttgtcacccaggctggagagcaatggcacaatcttggctccctgtaacctscacctcctgggttcaagcgattctcctgcctcagcctcccaagtagctca

SEQ ID NO: 1686 - DNA, 101 bp, Homo sapiens
tgtacctgtcatataactcagcactaatgctctctccactgtagcccactygctgtcttcgcaccttgggacagagaggggggtgccaggcattggatttc

SEQ ID NO: 1687 - DNA, 101 bp, Homo sapiens
caataacaaatatggactctgagttataacagcaggtttcgggtattcacrggaattgcagcagctacaccataactgatttaaatgtgtgtcattagtta

SEQ ID NO: 1688 - DNA, 101 bp, Homo sapiens
aacaaaaagccccattgggcatgataagccgaggaggcattcttctaaagyagacttttgtgtaaaaagcaaaggttacatgtgagtattaataaagaaga

SEQ ID NO: 1689 - DNA, 101 bp, Homo sapiens
agagcaatctttgcagaataggcttcagacattttttctgggggaggcagygaaggatttctgatctgtgggatactcattgctttgaatacctacgggga

SEQ ID NO: 1690 - DNA, 101 bp, Homo sapiens
ctttctttttgagcagtacacagataggtgtttttttcatttacctttacrccaaggtccttcattagctcaatctcaaaattcactacatcatacggcag

SEQ ID NO: 1691 - DNA, 101 bp, Homo sapiens
agcactcggcaatgagcatcccctggggccccccaaagccccggaaggccktgttggagggaaggttggttttgcacagccgcccagtgccccggatgttg

SEQ ID NO: 1692 - DNA, 101 bp, Homo sapiens
gccttttctcccctctgaggtgagcaaaggccagcgacatcctaatgcackcaggggtgtgggcagggtcctcagagcatcttacatccaaactaagttgt

SEQ ID NO: 1693 - DNA, 101 bp, Homo sapiens
gcttcaccttctccctccttctccaggggatcatccccttaccttattggstaaaactgcgtcaatctcctcctgcagtttctgctggacatcagggtgag

SEQ ID NO: 1694 - DNA, 101 bp, Homo sapiens
gactcctggaagctggacctctttcagtcctgtttgaatgcgggcttcttstttggctctctcggtgttggctactttgcagacaggtatgtaaaggccag

SEQ ID NO: 1695 - DNA, 101 bp, Homo sapiens
ctggttcttcccaaatatgaaaggataatgcagaagtacaacctgctgccrgagaagtccatgtatgatttggttcatgggtccagcctgtggatgctgtg

SEQ ID NO: 1696 - DNA, 101 bp, Homo sapiens
atcgtactggctcactcagagaggacgtccttcaactatgccatgaaggargctgctgcagcggctttgaagaagaaaggatgggaggtggtggagtcgga

SEQ ID NO: 1697 - DNA, 101 bp, Homo sapiens
ataaactttgaaaaaaaagatttcagctaaaattagtttcctctccatgcmgagtctgaatatattataaaaataaaagaataattgtctttcacacaatt

SEQ ID NO: 1698 - DNA, 101 bp, Homo sapiens
aatgctgtgtccttacatggcagaagggtgaaagtggcccagctagttccstggagcccttttataagagcactaatccgttcctgagggcagagccttca

SEQ ID NO: 1699 - DNA, 101 bp, Homo sapiens
ctcttggagtctcttctccctcttttttctttgttcttttctgaatctagrgaatccaaattgtccctctttttccctgggagcttaatttcctctgtatc

SEQ ID NO: 1700 - DNA, 101 bp, Homo sapiens
actttacctggatgtttagttggatcataagaaagaacacacaggagatamtgaaacttctttcccaggagggaaaacattgtatctgcatagctacaaag

SEQ ID NO: 1701 - DNA, 101 bp, Homo sapiens
gtgctactggtagtgctagcccactagcccactgggcagcgactgcacccrtatcagagtgtggaaagccttggatgccacattaaggagttggattttgt

SEQ ID NO: 1702 - DNA, 101 bp, Homo sapiens
cttactctttaaaaatttatttattgatatataatatttgtacatattttrggggtgtatgtgatattttgctacctgtctacaatgtgtaattgtcacat

SEQ ID NO: 1703 - DNA, 101 bp, Homo sapiens
agattcctgtggatggggatcggcagtgcctgcaactactacaaccgggtrtatggagaattcatgcgagtctggatctctggagaggaaacactcattat

SEQ ID NO: 1704 - DNA, 101 bp, Homo sapiens
tcataattccaaaacattcttaccccaaaagaaatgtatgcacctagcacrcttccagcaatggtagagaacccggcggtcatgatggcgtggagttcaga

SEQ ID NO: 1705 - DNA, 101 bp, Homo sapiens
cactgtggactccagtcattcaaggaggtctccactcttgggttttttttmttttcttttcttttgctattttgcctgaacaccccaacactcttggtttt

SEQ ID NO: 1706 - DNA, 101 bp, Homo sapiens
acacttaagagacggggcaaatgtggatccaagaaaccagggccatgaccrggtccactgtggagcagccatctatctacctgactcctgagccaggctgc

SEQ ID NO: 1707 - DNA, 101 bp, Homo sapiens
caacagatgtaaatgtttcttgtcagacttaaagtctgtgttgatgttagytctggttggttttttcctgaattccaaaagggaagagggtacaatgaggc

SEQ ID NO: 1708 - DNA, 101 bp, Homo sapiens
aaggacacgagaccaaaggatcttggagctcttgagacaagtgaagttgcsaattctgctttgtgcttttgaggtaaagagcagcttccactgtctctgaa

SEQ ID NO: 1709 - DNA, 101 bp, Homo sapiens
atgattggtccagtcattggctttgcactgggatctctgtttgctaaaatrtacgtggatattggatatgtagatctgagtaagtacaattagaacaaggt

SEQ ID NO: 1710 - DNA, 101 bp, Homo sapiens
gttggtggtatggattgtaatcggttttatcgattttggtgttgttcagaratactttcctgtaagttgaatgccttgggctatatggtggttgtgtttta

SEQ ID NO: 1711 - DNA, 101 bp, Homo sapiens
tttgacttagagttggtggaccctgacacaccactaccccatgttgacccrcagcgctggggttttggcaccatgcagcccagccacgatgtgcgcttccg

SEQ ID NO: 1712 - DNA, 101 bp, Homo sapiens
cagcgcatcctgaaccacgtgctgcagcatgcggagcccgggaacgcacaragcgtgctggaggccattgacacctactgcgagcagaaggagtgggccat

SEQ ID NO: 1713 - DNA, 101 bp, Homo sapiens
tgattgagccagttgtttatctttcgctccatcaaccaagtcacaattggrgttgggagggaatttctcaacatgttctgaaagcgtgtcatgaacaccat

SEQ ID NO: 1714 - DNA, 101 bp, Homo sapiens
tctgcaagatgcccatcaacaacaagatggcccagtggggcaacaagcctrtatgctgagcaggaggcagacttgcagagcttgttttgtttcatcctgtc

SEQ ID NO: 1715 - DNA, 101 bp, Homo sapiens
ccctccagtctctgcctaatttttagtgtttaataacaaccgaatgtctartaaatgactctcctctgagctgtaataaataaaatggtagtaatgaatgc

SEQ ID NO: 1716 - DNA, 101 bp, Homo sapiens
catctgctactttgggaggccctttacatagaaaacagcattctttttgcyaaatatgaccaaattacttttatttataatttttgatttatatttcagct

SEQ ID NO: 1717 - DNA, 101 bp, Homo sapiens
attgaggaaaaaaagtgtatctttcaagtagatgcaaagcattataatgaytgacacttgtatctaactccagtcttacagataactaaggcaaaaagcta

SEQ ID NO: 1718 - DNA, 101 bp, Homo sapiens
cacaaaaagatgagacaccacacgaatccagtaaagaatcccatcactatyccttttctaattccccaacgctgggcgaacacaagatttttctcatacct

SEQ ID NO: 1719 - DNA, 101 bp, Homo sapiens
ctgggctgaagttctctgatggctcgtgcagggtggactggcctccttccmctatatgtgtgtctactgctgacctgtggctttgccaaggcagggaagct

SEQ ID NO: 1720 - DNA, 101 bp, Homo sapiens
agagctctacttacagaacagccctgaggcctgtgactatgggctctgaarggggcaggagtcagcaataaagctatgtctgatattttccttcactaata

SEQ ID NO: 1721 - DNA, 101 bp, Homo sapiens
gctctcttgctgcttaccctagcttatttgttttggcccaagagaaggtgscctggtgccaagtaccccaagagcctcctgtccctgcccctggtgggcag

SEQ ID NO: 1722 - DNA, 101 bp, Homo sapiens
gaatccaaggtccttctaccacatgcacatacaaaatctttaaactcactytgaacactctgagaaaatgctttgacccaggcatacattttgataaattt

SEQ ID NO: 1723 - DNA, 101 bp, Homo sapiens
gacacactggacatggtcttcctcgaccactggaaggaccggtacctgccrgacacgcttctcttggaggtgagccccaaccaggatggcatccgtgccag

SEQ ID NO: 1724 - DNA, 101 bp, Homo sapiens
aagagactggaccctgccccctaggagggtaaatgtctgttctcccatggyctctgtttcccttcctctctgactgcgcctttgctgccctggttcctctt

SEQ ID NO: 1725 - DNA, 101 bp, Homo sapiens
ctttggggaggagtgatgggaaatggtttacaattaacagcatattccaaygaagaaagaaagcatatgatgtctgcacaacagaggagagtgtccacaat

SEQ ID NO: 1726 - DNA, 101 bp, Homo sapiens
ttctctgacctgtcaaccagttagtttgggaattgatgctgtctgtgtcckgaccctgtctgtgggccaggaagggtctggctgttgggaaagatggtggt

SEQ ID NO: 1727 - DNA, 101 bp, Homo sapiens
ctcctggcattcaggggagtgcgttgcagcaccccatttttttttcattgragtcctgtcttccagccaggcacagtgaatcacttgaggccacgagtttg

SEQ ID NO: 1728 - DNA, 101 bp, Homo sapiens
tgaacccaggttccagtgagccgagatcatgccactgtactccaacctacrtgacagagtgagaccctgtctccccgccccccccaccaaaaaaaaaaaaa

SEQ ID NO: 1729 - DNA, 101 bp, Homo sapiens
ggttcttgcttgggatatgtcatgttgctatagtcaaatgaagacggggcrggtgtcatctgaaggctcagctgggctgggtgtccacgctggcttaggca

SEQ ID NO: 1730 - DNA, 101 bp, Homo sapiens
tgtatcgtttcctgttgcccttagaaaggctgcatcgtgttgtctggccasttcctctattgtgtgcaggcatgttggggagtgagtagagttgggtggat

SEQ ID NO: 1731 - DNA, 101 bp, Homo sapiens
ggactggtggcccgcgcccgagctccgcaggcgggaagcaccctggatttrggaagtcccgggagcagcgcggcggcacctccctcacccaaggggccgcg

SEQ ID NO: 1732 - DNA, 101 bp, Homo sapiens
gcatatggacatgtaatgtcacatctttgtggagtgtgattttcttttttyacatatttgtatgcagtagagagcctgttgtagaaaacgctccctgtatc

SEQ ID NO: 1733 - DNA, 101 bp, Homo sapiens
cagatgatgtgccgaagagttgttttgtgtttcctacagaaaccacatacygtgtcatacctcctttccaaacacctgcaacataaaagcaaaaaggcagg

SEQ ID NO: 1734 - DNA, 101 bp, Homo sapiens
tgtttttccattgggactgtggaagaatggatgggtacctgtcctccattygttgtcgagatgattcttgttgtgcctccacactgcttcacataccacag

SEQ ID NO: 1735 - DNA, 101 bp, Homo sapiens
ccagtgtgaaggagttcacggaaacctcagctgtgtttgaggatgggaccrtgtttgaggctatcgactctgtcatctttgcaacaggctatgattattcc

SEQ ID NO: 1736 - DNA, 101 bp, Homo sapiens
cttagccttcctgccccatctttcttctctccctgaacatcagggcatccrggcaagggaccagctgcatcggcacctggagggggccatttctgagaagc

SEQ ID NO: 1737 - DNA, 101 bp, Homo sapiens
tggtctgggaagaggtggtctgctgacctgtggtatctcagaggggacgtycctcctcctccctgtgcaccaggtgggctgcaccctcctgcctattcagg

SEQ ID NO: 1738 - DNA, 101 bp, Homo sapiens
cagaatcttatagggattgagccataggaaccatgccatataaaaagagcygtgttaatgtttcatgccatgaaggtttgttggataatttcagttaagtg

SEQ ID NO: 1739 - DNA, 101 bp, Homo sapiens
cacttacaaatgcaggcagcagccagcaggcggctggcagcataaggggcraagcagctcgggaagagaggctgtaccatgtagttggcaaaggtgatggc

SEQ ID NO: 1740 - DNA, 101 bp, Homo sapiens
ctgtggttggctttagacacagcccaaaggccagagcagctgatccccttygcaggaatctgcatgttcatccttatcctctttgcctgctccaaacacca

SEQ ID NO: 1741 - DNA, 101 bp, Homo sapiens
aaatcactgcatatgggaaattaagagatccaggaccatatttgataagakttcctaaaaataatgtaattattaatgctaaagactgctcatgtatcttg

SEQ ID NO: 1742 - DNA, 101 bp, Homo sapiens
agtactgttccggggagaaaaacagtctcaaaacttgaacttcttgggaakagaagtgttgggctgagaagtaacattcccaggaaatagtgagaagctcg

SEQ ID NO: 1743 - DNA, 101 bp, Homo sapiens
ccgaatgaacctggacccattcagccagtactcggatgaagaagtctggaygtccctggagctggcccacctgaaggacttcgtgtcagcccttcctgaca

SEQ ID NO: 1744 - DNA, 101 bp, Homo sapiens
ccttggtttttactgctctgagaattgttgagatactttactaataaactstgtagttggaaaatctacatttgcattgtctggccagctctaatgcagag

SEQ ID NO: 1745 - DNA, 101 bp, Homo sapiens
tggaggcagggagggctttcctgggaccaggcgaaggtggcactgtgtatsgtgatgcaatccttcccggcagctgcagggcacaagaggccatttacagg

SEQ ID NO: 1746 - DNA, 101 bp, Homo sapiens
acagaccggatgatgtcggggtggcacaaactgaggaggggggagatgggkcccatccagaccttaaagccctgggggtaggtggccaccagctgagtcag

SEQ ID NO: 1747 - DNA, 101 bp, Homo sapiens
caggcctcaaatgcactgccccaccagctgttccagatggtacctgaggcrttgatgacagaccggatgatgtcggggtggcacaaactgaggagggggga

SEQ ID NO: 1748 - DNA, 101 bp, Homo sapiens
ttccctttccagatcctaacacattttgaggtgcagcctgagccaggtgcrgccccagttagacccaagacccggactgtcctggtacctgaaaggagcat

SEQ ID NO: 1749 - DNA, 101 bp, Homo sapiens
aagcataagctcagtaactgtgcatctggtctgtacctggttggtccttcrtctttgcatgtaagctctttgagaggaagggtgaagccttatttgttttt

SEQ ID NO: 1750 - DNA, 101 bp, Homo sapiens
aaagctgtctggcttatcttcttcatgctgggtctgggaacgctgctcccrtggaattttttcatgacggccactcaggtgaggctggagggactgggctc

SEQ ID NO: 1751 - DNA, 101 bp, Homo sapiens
cgagaccgtatcaggtttgccagttatccgtgcctttgagcaccagcagckatttctgaaacacaatgaggtgaggattgacaccaaccagaaatgtgtct

SEQ ID NO: 1752 - DNA, 101 bp, Homo sapiens
aaatccaagatcctggtcctggatgaggccactgctgcggtggatctagaracagacaacctcattcagacgaccatccaaaacgagttcgcccactgcac

SEQ ID NO: 1753 - DNA, 101 bp, Homo sapiens
taagacttttatttctttcttccttgtttcagggtaatggtcctagacaaygggaagattatagagtgcggcagccctgaagaactgctacaaatccctgg

SEQ ID NO: 1754 - DNA, 101 bp, Homo sapiens
atcatagccccatttctgctctttcggctagcagccgtgtggctagaactrcctctgatcatctttggtaagaactcatttgctattcttaagagccttca

SEQ ID NO: 1755 - DNA, 101 bp, Homo sapiens
ggctgttgacccctcctctgtctcatcccccagggctctctgccttcctgytggtggcctgcctcctggatttccagagggccctggctctgtttgtcctc

SEQ ID NO: 1756 - DNA, 101 bp, Homo sapiens
tcgtcatcagaacagaaccaggattcattgcgttcgagtggctgggcgagmagatccgggtaggtatgtggggtctggctgcccagagcatcttagattac

SEQ ID NO: 1757 - DNA, 101 bp, Homo sapiens
cattccacagctaagtattattttatttcctttttttagtttcgatactcygattggcaggataaattgtttatgtcgctgggtaccatcatggccatagc

SEQ ID NO: 1758 - DNA, 101 bp, Homo sapiens
agctccattaatgacctcacagaccacaaccatgatggcacccccgacagmcttcctgtgcacgtgtgagttggtgctcactgctgcccccatcaccctcc

SEQ ID NO: 1759 - DNA, 101 bp, Homo sapiens
ttctttattttgatagaaaaggcttcacaataagctcaacagagattccgycacaatgtcaacctaatttcaatactttctaccttgaatttggtagtgct

SEQ ID NO: 1760 - DNA, 101 bp, Homo sapiens
attttcttttattttgctcagaaaactcttccagtcttccccaaaggaaaygaagtccaaattaaagttttgaatataggaaacaataccatgaatatatc

SEQ ID NO: 1761 - DNA, 101 bp, Homo sapiens
agcaggactcactttgctttgcttcctcaggctccttccaacatgaagtcrgtgcttcaggcaggatggctgctgaccgtggctgttggcaacatcattgt

SEQ ID NO: 1762 - DNA, 101 bp, Homo sapiens
cagcactgggcgttctgcttgcaggtggccttgtgcacatttgccgtctaygtgaccattgacgagaacaacatcctggatgcccagacagccttcgtgtc

SEQ ID NO: 1763 - DNA, 101 bp, Homo sapiens
atctattgttacatattgctttctagtggaatttcccgttggttatgctcwtttggaagatagggcctgcactgagctgtggaaacacagtggttgtcaaa

SEQ ID NO: 1764 - DNA, 101 bp, Homo sapiens
gctccagcaaacttttctttgttcgctgcagtgccgccctacaccgtggtstatttcccagttcgaggtaggagcatgtgtctggcagggaagggaggcag

SEQ ID NO: 1765 - DNA, 101 bp, Homo sapiens
ctgtcaccaggggcgaggctcatcaccatcgagatcaaccccgactgtgcygccatcacccagcggatggtggatttcgctggcgtgaaggacaaggtgtg

SEQ ID NO: 1766 - DNA, 101 bp, Homo sapiens
ttacttcccaacaggcgtcgggtttggagttcaagtcggtagccgacagcrttctgtttttacgtgacaaaagatgggaagaggtcagaggtgccctgatg

SEQ ID NO: 1767 - DNA, 101 bp, Homo sapiens
tccagccctggtagcaggcctccccattcacatgttcaggactgcgcacartgcccgggagaaactggcagagagcttgaggcacgagaacctccaaaaga

SEQ ID NO: 1768 - DNA, 101 bp, Homo sapiens
agcccaggagttcaagaccagcctggacagcttagtgagatcccgtctccraagaaaagatatgtattctaattggcagattgttttttcctaaggaaact

SEQ ID NO: 1769 - DNA, 101 bp, Homo sapiens
gtgcctttgaccccaatgtgaacaggcccgagccagggcgaccctgacctycccggctgatgctccaggtgaagagaccggccgtaaacccaaaagcgaga

SEQ ID NO: 1770 - DNA, 101 bp, Homo sapiens
gatgacattgatgctgttatctttgccacaggctatagctttgactttccrtttctggaagattccgtcaaagtggtcaaaaacaagatatccctgtataa

SEQ ID NO: 1771 - DNA, 101 bp, Homo sapiens
aattgtctctgttttccatacagagtcctgaggaaagagcctgtatttaaygatgagctcccagcaagcattctgtgtggcattgtgtccgtaaagcctaa

SEQ ID NO: 1772 - DNA, 101 bp, Homo sapiens
cctgccactttgttttgagcaaactgttctggtgtggattcccttgggctwcctatggctcctggccccctggcagcttctccacgtgtataaatccagga

SEQ ID NO: 1773 - DNA, 101 bp, Homo sapiens
tggcctaaaatggctgaaatgagagaggtttttccacttcccacactgccrcagattccaaccagtttaccctggacaaggcacacagagaggagggtcat

SEQ ID NO: 1774 - DNA, 100 bp, Homo sapiens
tgctgggacccacctccccctccccggccacatgccgcgtccctgccccsacccgggtctggtgctgaggatacagctcttctcagtgtctgaacaatct

SEQ ID NO: 1775 - DNA, 101 bp, Homo sapiens
ttttttgtcagagtttctttggttatcccctgagcatcttcttcatcgtgrtcaatgagttttgcgaaagattttcctactatggaatgcgaggtaactgt

SEQ ID NO: 1776 - DNA, 101 bp, Homo sapiens
ggacaagcagtcacctcagtaagctccattaatgacctcacagaccacaaycatgatggcacccccgacagccttcctgtgcacgtgtgagttggtgctca

SEQ ID NO: 1777 - DNA, 101 bp, Homo sapiens
taggtgcatacctgagtctcccaggtggctgatctcccagaataagaatgstgaagccatgagaatcattaagcacatcgcaaagaaaaatggaaaatctc

SEQ ID NO: 1778 - DNA, 101 bp, Homo sapiens
ccaactcctggatgttggacctattccagtcatcagtgaatgtaggattcyttattggctctatgagtatcggctacatagcagacaggtaggttgaatca

SEQ ID NO: 1779 - DNA, 101 bp, Homo sapiens
ttgcttccagaaactaaagggaaagctttgcctgagaccatcgaggaagcygaaaatatgcaaaggtaggcagttgaaagttctaaatgaattgttctata

SEQ ID NO: 1780 - DNA, 101 bp, Homo sapiens
tttcatctcgggcgtggtggaactgccaggagctctcttgatcttactaaycattgagcgccttggacgacgcctcccctttgcggcaagcaatatagtgg

SEQ ID NO: 1781 - DNA, 101 bp, Homo sapiens
ggctccctgcgggctgtaggaggaaggccagctccctaggagtgacttgarccccgcagagatcaggagcagctggagcgaggcggcgccgaagcccttct

SEQ ID NO: 1782 - DNA, 101 bp, Homo sapiens
cccagcggcctgagcaactggtgtccttcgcaggaatctgcgtgttcgtckctctcctctttgcctgctcaaagcatcattgcgcagtgagtgctagttgt

SEQ ID NO: 1783 - DNA, 101 bp, Homo sapiens
acccccaccctgcttgtctgacatctttcctgtttgcagaccgaggctccrttactgatccggccctacttggcagacatgacactctctgaagtccacgt

SEQ ID NO: 1784 - DNA, 101 bp, Homo sapiens
actgtccacctagaacctgcactctcactcttgcagatcgatgccacctcrttgattgcagcctctgtgatggctgccccttgtgccttggccctctccaa

SEQ ID NO: 1785 - DNA, 101 bp, Homo sapiens
gagctgaagtcctcacgacgtttgccctctgtggatttgccaatttcagcyccattgggatcatgctgggaggcttgagtgagtctaatcagggcctcacc

SEQ ID NO: 1786 - DNA, 101 bp, Homo sapiens
gaaccaggcctggagctcccactgcgatctttgctttctttttagcgtcartccagagttcagcccagaggccctggacaactgctgtcggttttacaacc

SEQ ID NO: 1787 - DNA, 101 bp, Homo sapiens
caactgctgtcggttttacaaccacacgatctgtgcacagtgaggacagarcatgcttgtgcttctgcgcttctgagggctgttctcccccgggaaccatc

SEQ ID NO: 1788 - DNA, 101 bp, Homo sapiens
accacccgttcatctcctcttccagaacgttacttcattcctgtgtcctgyttcttgactttcaatatctttgactggttgggccggagcctcacagctgt

SEQ ID NO: 1789 - DNA, 101 bp, Homo sapiens
tgctgctgctgtgcaacattaagccccgccgctacctgactgtggtcttcragcacgatgcctggttcatcttcttcatggctgcctttgccttctccaac

SEQ ID NO: 1790 - DNA, 101 bp, Homo sapiens
gagaggggatggggcctgtctctgatcactgacaccaccccaggtggctcrgagctatcagaaagtgccttcggctactttatcacagcctgtgctgttat

SEQ ID NO: 1791 - DNA, 101 bp, Homo sapiens
ctggccggggccggcaacagcacagccaggatcctgagcaccaaccacacrggtcccgaggatgccttcaacttcaacaattgggtgacgctgctgtccca

SEQ ID NO: 1792 - DNA, 101 bp, Homo sapiens
ctgggccccactgatgcactctgcctgcttctgagcagcgtcccggagacrgtgcgcattctgggcagcctgctggccatactgctgctctttgccctgac

SEQ ID NO: 1793 - DNA, 101 bp, Homo sapiens
gagccggcgggaccaggtgcctctcttctgcagctgaagttcctccgcaggtggcgtggacgccgagacctctgccctggggtactttatcacgccctgtg

SEQ ID NO: 1794 - DNA, 100 bp, Homo sapiens
ggcgggaccaggtgcctctcttctgcagctgaagttcctccgcaggtggctggacgccgagacctctgccctggggtactttatcacgccctgtgtgggc

SEQ ID NO: 1795 - DNA, 101 bp, Homo sapiens
tgtacatcagagacggagcattttacaccttgaagacgtaccctgtgccaytccaaagggaggatgtgaaagagtcttttgttagtctcgggcataatgtt

SEQ ID NO: 1796 - DNA, 100 bp, Homo sapiens
ggaggtggccagtgcctgaagcccacaccggaccctcttctgccttgcaggttgcctgyggacacgctgggcctctgtcctgatgctgctgagctccctg

SEQ ID NO: 1797 - DNA, 101 bp, Homo sapiens
ttatgtcgctgggtaccatcatggccatagctcacggatcaggtctccccstcatgatgatagtatttggagagatgactgacaaatttgttgatactgca

SEQ ID NO: 1798 - DNA, 101 bp, Homo sapiens
ctcacccttgtgataatggccatcagccctattctaggactctctgcagcygtttgggcaaaggtatgtgaaagctgggcctttttatgtgtgttaacccc

SEQ ID NO: 1799 - DNA, 101 bp, Homo sapiens
agagctgatccatgttttctgtgttagaaatttgacaccctggttggagasagaggggcccagctgagtggtgggcagaagcagaggatcgccattgcacg

SEQ ID NO: 1800 - DNA, 101 bp, Homo sapiens
ccagggtttcacgtttgggaaagctggcgagatcctcaccagaagactgcrgtcaatggcttttaaagcaatgctaagacaggtaggagtgtgcgctggag

SEQ ID NO: 1801 - DNA, 101 bp, Homo sapiens
aacatttaaacatttattcaggataaatttgaaggaaatataacatttaaygaagtcgtgttcaactatcccacccgagcaaacgtgccagtgcttcaggg

SEQ ID NO: 1802 - DNA, 100 bp, Homo sapiens
gggagataaggggactcagctctcaggaggtcaaaaacagaggattgctrttgcccgagccctcatcagacaacctcaaatcctcctgttggatgaagct

SEQ ID NO: 1803 - DNA, 101 bp, Homo sapiens
ggccttgggatttttgctgtggatcgtctgctgggcagacctcttctactytttctgggaaagaagtcggggcatattcctggccccagtgtttctggtca

SEQ ID NO: 1804 - DNA, 101 bp, Homo sapiens
acgtgtcacaagtcattccaggccctctctttgctcctttgcaggttgctyatcaagttcgtgaatgacacgaaggccccagactggcagggctacttcta

SEQ ID NO: 1805 - DNA, 101 bp, Homo sapiens
ttgatgaagagatgaaaaccaagacattagtgagcaagtttgaaacgcacmtgaagagagagctgcagaaagccaggcgggcactccagagacggcaggag

SEQ ID NO: 1806 - DNA, 101 bp, Homo sapiens
gatggtgcttgtaatcccaattaatgcgatactgtccaccaagagtaagaycattcaggtaaagaaaaagtcacccagaagaatataagctttctttaaag

SEQ ID NO: 1807 - DNA, 101 bp, Homo sapiens
ggaataaattgctcatgaccttgccctttccaggtatctgtggtcacattktctgtttatgtcctggtggatagcaacaatattttggatgcacaaaaggc

SEQ ID NO: 1808 - DNA, 101 bp, Homo sapiens
tctgggaaatcctccttgatatcagccatgctgggagaaatggaaaatgtmcacgggcacatcaccatcaaggtgagagggaatgccaatgcaaaagcctc

SEQ ID NO: 1809 - DNA, 101 bp, Homo sapiens
ccatctacctggagtacctacaagcaataggattgttttcgatattcttcrtcatccttgcgtttgtgatgaattctgtggcttttattggatccaacctc

SEQ ID NO: 1810 - DNA, 101 bp, Homo sapiens
ctttggtttcgtccatgcatcaaatatcttgcacaagcaactgctgaacartatccttcgagcacctatgagattttttgacacaacacccacaggccgga

SEQ ID NO: 1811 - DNA, 101 bp, Homo sapiens
ccagttatccgtgcctttgagcaccagcagcgatttctgaaacacaatgargtgaggattgacaccaaccagaaatgtgtcttttcctggatcacctccaa

SEQ ID NO: 1812 - DNA, 101 bp, Homo sapiens
ggtttgagatcttgctcacctgtggactttccctacctaagggccacatcygggacatcacagacagcctgaytgagcactgtcaggagaagcagctggat

SEQ ID NO: 1813 - DNA, 101 bp, Homo sapiens
agaaggtgattatctttggcatgggcaagcggaagtgtatcggtgagaccrttgcccgctgggaggtctttctcttcctggctatcctgctgcaacgggtg

SEQ ID NO: 1814 - DNA, 96 bp, Homo sapiens
aggtgattatctttggcatgggcaagcggaagtgtatcggtgagamcattgcccgctgggaggtctttctcttcctggctatcctgctgcaacggg

SEQ ID NO: 1815 - DNA, 101 bp, Homo sapiens
ccctgtccagggtttgacacagtcacaactgctatctcctggagcctcatrtatttggtgatgaaccccagggtacagagaaagatccaagaggagctagg

SEQ ID NO: 1816 - DNA, 101 bp, Homo sapiens
cagtctgttcccttctcggccacagagcttctcctggcctctgccatcttstgcctggtattctgggtgctcaagggtttgaggcctcgggtccccaaagg

SEQ ID NO: 1817 - DNA, 101 bp, Homo sapiens
aagcacgcccgctgtgaacatgtccaggcgcggctgcgcttctccatcaaytgaagaagacaccaccattctgaggccagggagcgagtgggggccagcca

SEQ ID NO: 1818 - DNA, 101 bp, Homo sapiens
cacaacaagggacacaacgctgaatggcttctacatccccaagaaatgctrtgtcttcgtaaaccagtggcaggtcaaccatgacccgtgagtacataccc

SEQ ID NO: 1819 - DNA, 114 bp, Homo sapiens
tgcttttctctctccacattaaacaccaaacaggtatcctgatgtgcagactcgagtgcaggcagaattggatcaggtcgtggggagggaccgtctgccttgtatgggtgacca

SEQ ID NO: 1820 - DNA, 101 bp, Homo sapiens
tgcttttctctctccacattaaacaccaaacaggtatcctgatgtgcagactcattggatcaggtcgtggggagggaccgtctgccttgtatgggtgacca

SEQ ID NO: 1821 - DNA, 101 bp, Homo sapiens
ggtcgtggggagggaccgtctgccttgtatgggtgaccagcccaacctgcyctatgtcctggccttcctttatgaagccatgcgcttctccagctttgtgc

SEQ ID NO: 1822 - DNA, 101 bp, Homo sapiens
tgaccagcccaacctgccctatgtcctggccttcctttatgaagccatgcrcttctccagctttgtgcctgtcactattcctcatgccaccactgccaaca

SEQ ID NO: 1823 - DNA, 101 bp, Homo sapiens
ttttgtcaaccagtggtctgtgaatcatgacccagtgaagtggcctaaccyggagaactttgatccagctcgattcttggacaaggatggcctcatcaaca

SEQ ID NO: 1824 - DNA, 125 bp, Homo sapiens
catcaacaaggacctgaccagcagagtgatgattttttcagtgggcaaaaggcggtgcattggcgaagaactttctaagatgcagctttttctcttcatctccatcctggctcaccagtgcgatt

SEQ ID NO: 1825 - DNA, 100 bp, Homo sapiens
catcaacaaggacctgaccagcagagtgatgattttttcagtgggcaaaataagatgcagctttttctcttcatctccatcctggctcaccagtgcgatt

SEQ ID NO: 1826 - DNA, 101 bp, Homo sapiens
tccccctgcagcccctgtgtactttcaccaatccccccaacctgcctcatwacacacaccttcctcctccctcccagggcactgaagtgttccctatgctg

SEQ ID NO: 1827 - DNA, 101 bp, Homo sapiens
gccactcccctcacctggggcaccctagttccccctgcagcccctgtgtaytttcaccaatccccccaacctgcctcattacacacaccttcctcctccct

SEQ ID NO: 1828 - DNA, 101 bp, Homo sapiens
atgatgccgtcaaggaggctctggtggaccaggctgaggagttcagcgggygaggcgagcaggccaccttcgactggctcttcaaaggctatggtgagggg

SEQ ID NO: 1829 - DNA, 101 bp, Homo sapiens
atgctggcctcagggatgcttctggtggccttgctggtctgcctgactgtratggtcttgatgtctgtttggcagcagaggaagagcaaggggaagctgcc

SEQ ID NO: 1830 - DNA, 101 bp, Homo sapiens
tctttggggaccgctttgactataaggacaaagagttcctgtcactgttgmgcatgatgctaggaatcttccagttcacgtcaacctccacggggcaggta

SEQ ID NO: 1831 - DNA, 101 bp, Homo sapiens
tcctcctcttccttgcactcctcacaggactcttgctactcctggttcagygccaccctaacacccatgaccgcctcccaccagggccccgccctctgccc

SEQ ID NO: 1832 - DNA, 101 bp, Homo sapiens
gatgtgtgggtgaaggtgcacagtgaggatagagacatatgggagtccagyagacatcaatcaaactggactcagtttgcacacacctggagctcaagagt

SEQ ID NO: 1833 - DNA, 101 bp, Homo sapiens
ttgttaacatgactcactgagacagtctttgtttctcctagggcacagtcrtagtgccaactctggactctgttttgtatgacaaccaagaatttcctgat

SEQ ID NO: 1834 - DNA, 101 bp, Homo sapiens
ctcatcatattttctattatacataaagattcattgttaatataaaagtayaaaattgcaacctatgaattaagaacttctatatattgccagttagaaga

SEQ ID NO: 1835 - DNA, 101 bp, Homo sapiens
tggggatgtggctggagttccccgttgtctaaccagtgccaaagggcaggwcggtacctcaccccacgttcttaactatgggttggcaacatgttcctgga

SEQ ID NO: 1836 - DNA, 101 bp, Homo sapiens
gatagacgagtagcaagagggcattggttggtgggtcaccctccttctcakaacacattataaaaaccttccgtttccacaggattgtctcccgggctggc

SEQ ID NO: 1837 - DNA, 100 bp, Homo sapiens
tttatccaaatctgtttctttcttcccaggcacctgtcacctacgatgcyctggtacagatggagtaccttgacatggtggtgaatgaaacgctcagatt

SEQ ID NO: 1838 - DNA, 101 bp, Homo sapiens
ttgacatggtggtgaatgaaacgctcagattattcccaattgctatgagayttgagagggtctgcaaaaaagatgttgagatcaatgggatgttcattccc

SEQ ID NO: 1839 - DNA, 101 bp, Homo sapiens
agtagtgatggctctcatcccagacttggccatggaaacctggcttctccyggctgtcagcctggtgctcctctatctgtgagtaactgtccaggctcctc

SEQ ID NO: 1840 - DNA, 101 bp, Homo sapiens
acatctttctccactcagcgtctttggggcctacagcatggatgtgatcastagcacatcatttggagtgaacatcgactctctcaacaatccacaagacc

SEQ ID NO: 1841 - DNA, 101 bp, Homo sapiens
aaactgcaggaggaaattgatgcagttttacccaataaggtgagtggatgrtacatggagaaggagggaggaggtgaaaccttagcaaaaatgcctcctca

SEQ ID NO: 1842 - DNA, 101 bp, Homo sapiens
tccttacatatacacaccctttggaagtggacccagaaactgcattggcaygaggtttgctctcatgaacatgaaacttgctctaatcagagtccttcaga

SEQ ID NO: 1843 - DNA, 101 bp, Homo sapiens
cccctttgtggaaaacaccaagaagcttttaagatttgattttttggatcsattctttctctcaataagtatgtggactactatttccttttatttatctt

SEQ ID NO: 1844 - DNA, 101 bp, Homo sapiens
tatgaaaagtgccatctctatagctgaggatgaagaatggaagagattacratcattgctgtctccaaccttcaccagtggaaaactcaaggaggtatgaa

SEQ ID NO: 1845 - DNA, 101 bp, Homo sapiens
tgaaatcaatggggtattcattcccaaagggtcaatggtggtgattccaamttatgctcttcaccatgacccaaagtactggacagagcctgaggagttcc

SEQ ID NO: 1846 - DNA, 101 bp, Homo sapiens
aatacggtcattgctgtctccaaccttcaccagcggaaaactcaaggaggyatgaaaataagatgagtcttaattagaaatgtaaagaatgaatctgggga

SEQ ID NO: 1847 - DNA, 101 bp, Homo sapiens
tacatagaatattaactcaatggaggtcagtgagtggtgtgtgtgtgattmtttgccaactgccgaggtggagaagcctcttccgactgcaggcagagcac

SEQ ID NO: 1848 - DNA, 101 bp, Homo sapiens
ggactccccagtaacattgattgagttgtgtatgattctacatagaatatkaactcaatggaggtcagtgagtggtgtgtgtgtgattatttgccaactgc

SEQ ID NO: 1849 - DNA, 101 bp, Homo sapiens
cccagaacccttggactccccagtaacattgattgagttgtgtatgattcyacatagaatattaactcaatggaggtcagtgagtggtgtgtgtgtgatta

SEQ ID NO: 1850 - DNA, 101 bp, Homo sapiens
tgataagaacccagaacccttggactccccagtaacattgattgagttgtktatgattctacatagaatattaactcaatggaggtcagtgagtggtgtgt

SEQ ID NO: 1851 - DNA, 101 bp, Homo sapiens
ctgtgcagggcaggaaagctccacacacacagcccagcaaacagcagcacrctgctgaaaaaaagactcagaggagagagataaggaaggaaagtagtgat

SEQ ID NO: 1852 - DNA, 101 bp, Homo sapiens
gtatctcctggtttctctactgcatggccctgtaccctgagcaccagcatygttgtagagaggaggtccgcgagatcctaggggaccaggacttcttccag

SEQ ID NO: 1853 - DNA, 101 bp, Homo sapiens
acacattgcctcctatccctggactccaggacaagtgggaagagaaagctygggagggtaagtcctttgacatcttctgcgatgtgggtcacatggcgctg

SEQ ID NO: 1854 - DNA, 101 bp, Homo sapiens
gaaggccatgacaccaccaccagtggtatctcctggtttctctactgcatrgccctgtaccctgagcaccagcatcgttgtagagaggaggtccgcgagat

SEQ ID NO: 1855 - DNA, 101 bp, Homo sapiens
attttggaaaaatgtcactgaagtgattgaaagagtgcctggcatgcaagrataagaggttctttacataacatttcctaaatgcttaataaacgtttgtt

SEQ ID NO: 1856 - DNA, 101 bp, Homo sapiens
acctttgttatccattatcagatggttcccctcatcagccaagcctgcgamcttctcctggctcatttaaaacgctatgcggaatctggggacgcatttga

SEQ ID NO: 1857 - DNA, 101 bp, Homo sapiens
tcatcgctggctatgaaatcatcaccaacacactttcttttgccacctacstactggccaccaaccctgactgccaagagaagcttctgagagaggtagac

SEQ ID NO: 1858 - DNA, 101 bp, Homo sapiens
agatggccgtgggtgccctgcaccatgaccctgagcactggccaagcccgragaccttcaaccctgaaaggtgagtactgccccttttaaaaagctctgaa

SEQ ID NO: 1859 - DNA, 101 bp, Homo sapiens
cctgaccacacggacctgcaggttcacggctgaggcccggcagcagcaccrgcccttcacgtacctgcccttcggggccggcccacggagctgcctcgggg

SEQ ID NO: 1860 - DNA, 101 bp, Homo sapiens
tggtggacctggccatgcccatggcagacgggcgagaattcaacctgcgamgtggtgaccgcctcctcctcttccccttcctgagcccccagagagaccca

SEQ ID NO: 1861 - DNA, 101 bp, Homo sapiens
aattctcaatgatgccttctctgtgtttcttcaagacaactgtccttagtgtgagaaaatgtccagatttctcatcctctggccaatggaaggttgtcact

SEQ ID NO: 1862 - DNA, 100 bp, Homo sapiens
aattctcaatgatgccttctctgtgtttcttcaagacaactgtccttagttgagaaaatgtccagatttctcatcctctggccaatggaaggttgtcact

SEQ ID NO: 1863 - DNA, 101 bp, Homo sapiens
tccttcaggagaatgtggaagatggccgagcaagtatctatcaatctgtcrttaccaacaccagcaaagaaatgtcctgtttcagtgactttccaatgcct

SEQ ID NO: 1864 - DNA, 101 bp, Homo sapiens
agaatactgaagccactcaagactcgggccctgaaggattcatctaattttctcagtttcttttctgttgaaaatcctgggccttcttgctgttgttgtgg

SEQ ID NO: 1865 - DNA, 100 bp, Homo sapiens
agaatactgaagccactcaagactcgggccctgaaggattcatctaatttctcagtttcttttctgttgaaaatcctgggccttcttgctgttgttgtgg

SEQ ID NO: 1866 - DNA, 101 bp, Homo sapiens
gtttaaaatatagccataattagcctactcaaatccaagtgtaaaagtaawatgatttgctttcgttttgttttccttgcttaggggatcatggacattga

SEQ ID NO: 1867 - DNA, 101 bp, Homo sapiens
agtgctgagaaatatatttaagatttccttggggagaaatctcgtgcccamacctggtgatggatcccttactatttagaataaggaacaaaataaaccct

SEQ ID NO: 1868 - DNA, 101 bp, Homo sapiens
ctgtgatgtcattgtccttttacctattatattttttcatactctgtgaaracaaatcagttgccggactaaccatgacctatgatgggtttgtatatatc

SEQ ID NO: 1869 - DNA, 101 bp, Homo sapiens
ccttatccacttgtttaattaatcaaattttatcactcaatagagcatcamctgagatagtgggaaaaggtaagaattaatattgacagtaaaaagtcttc

SEQ ID NO: 1870 - DNA, 101 bp, Homo sapiens
ccaaacctcagaaccctcgggcacctgagagagatgttttgcggcgatgtygtgttggagggatgaagatggagttatcctctgcagaaattcctagacgc

SEQ ID NO: 1871 - DNA, 96 bp, Homo sapiens
tcatcttatgcctgctgtcggctgcctttgcgcccatctgtgtggrcatcgtcttcctgggtttcacacctgaccaccactgccagagtcctgggg

SEQ ID NO: 1872 - DNA, 100 bp, Homo sapiens
cattctggagcaggttggggagtctggctggttccagaagcaagccttcstcatcttatgcctgctgtcggctgcctttgcgcccatctgtgtgggcatc

SEQ ID NO: 1873 - DNA, 110 bp, Homo sapiens
gggccgcatctaccccatggccatgtcaaatttgttggcgggggcagcctgcctcgtcatgatttttatctcacctggtaagttggtaagttgtctgctttcatcatttc

SEQ ID NO: 1874 - DNA, 109 bp, Homo sapiens
gggccgcatctaccccatggccatgtcaaatttgttggcgggggcagcctgcctcgtctgatttttatctcacctggtaagttggtaagttgtctgctttcatcatttc

SEQ ID NO: 1875 - DNA, 96 bp, Homo sapiens
aaggtttggccgtaagctgtgtctcctgggaactgtgctggtcaaygcggtgtcgggcgtgctcatggccttctcgcccaactacatgtccatgct

SEQ ID NO: 1876 - DNA, 101 bp, Homo sapiens
cctgtgtgacataggtgggataatcacccccttcatagtcttcaggctgakggaggtctggcaagccttgcccctcattttgtttggtaagattttgtgga

SEQ ID NO: 1877 - DNA, 101 bp, Homo sapiens
gtttggccgtaagctgtgtctcctgggaactgtgctggtcaacgcggtgtygggcgtgctcatggccttctcgcccaactacatgtccatgctgctcttcc

SEQ ID NO: 1878 - DNA, 101 bp, Homo sapiens
ttgcaatacaaatgatctgcctggtgaatgctgagctgtaccccacattcrtcaggtgagtgcatggaacaggggtagccagtgaaatggctgtgaaccca

SEQ ID NO: 1879 - DNA, 101 bp, Homo sapiens
gaagcaggtggagggcatcaggcagggtgagctccagctgctgcgcacggsggcctacctccacaccacaaccaccttcacctggatgtgcagccccttcc

SEQ ID NO: 1880 - DNA, 101 bp, Homo sapiens
caagaaactcagacaggtgtctggaacactagagaaggctggtcagtaccyactctggagcatttctcatcagtagttcacatacaaatcatccatccttg

SEQ ID NO: 1881 - DNA, 100 bp, Homo sapiens
acgtggaaccagattcagcaagaagaacaaggacaacatagatccttacayatacacaccctttggaagtggacccagaaatgcattggcaygaggtttg

SEQ ID NO: 1882 - DNA, 101 bp, Homo sapiens
caaaggatgtggcagtttcctactaccacttctaccacatggccaaggtgyaccctgagcctgggacctgggacagcttcctggagaagttcatggtcgga

SEQ ID NO: 1883 - DNA, 101 bp, Homo sapiens
gtggcagtttcctactaccacttctaccacatggccaaggtgcaccctgascctgggacctgggacagcttcctggagaagttcatggtcggagaaggtgg

SEQ ID NO: 1884 - DNA, 101 bp, Homo sapiens
ggagtactggctgatggcaccaccagatttacatgcaagggcaaaccagtmcaccacttcatgaacaccagtacatttaccgagtacacagtggtggatga

SEQ ID NO: 1885 - DNA, 101 bp, Homo sapiens
gtcacctgcaattctcccttatcagggccattggcctctcccttctctctrtgagggatattttctctgacttgtcaatccacatcttcccattccctcaa

SEQ ID NO: 1886 - DNA, 101 bp, Homo sapiens
atgcaagccaagatgaactcagataatggcaatgctggcccagatcaagaytcagagctgctttcagataaccacattctcaccaccataggggacatctt

SEQ ID NO: 1887 - DNA, 101 bp, Homo sapiens
gacactgcctttgactgtgcaacatctgctctacgttgtggagctcgccgwgtgttcatcgtcttcagaaaaggctttgttaatataagagctgtccctga

SEQ ID NO: 1888 - DNA, 101 bp, Homo sapiens
tgcctccttcgctcatttcagagaatttctgcaggggttttcttcttagcwctttggggcatggttgtaggtgacaagctgctggtggtccctcaggacgg

SEQ ID NO: 1889 - DNA, 101 bp, Homo sapiens
agaaacctctgctgtctttgaagatgggacagtggaagaaaacattgatgytgtgatcttcactacaggatatacattttcttttccattttttgaagaac

SEQ ID NO: 1890 - DNA, 101 bp, Homo sapiens
acacttatgatgttgttcctgcagttacaagacctaagttccaagaagcarcagtcccacaacattctggatctgcttcgaacctggaatatccggatggt

SEQ ID NO: 1891 - DNA, 81 bp, Homo sapiens
ggcatatctgggtccctagaaggccctagatgtggggcttytagattaccccctcctcctgccatacccgcacatgacaat

SEQ ID NO: 1892 - DNA, 101 bp, Homo sapiens
agatataaggtagcttaataaactaagtaaaacgtatgacttgagtacaawaggattgttttaatccccattattctggaaagtgcatcctagtctcccag

SEQ ID NO: 1893 - DNA, 101 bp, Homo sapiens
aggtgttcttttcccttgcttcccatatttgtcccagttgcagccctgttsttatgtatttactcttcaatttcttatttatacctctcactcaattgtta

SEQ ID NO: 1894 - DNA, 101 bp, Homo sapiens
atctttgtggagtgtgattttcttttttcacatatttgtatgcagtagagrgcctgttgtagaaaacgctccctgtatcttgctgtactgttaaagaaagc

SEQ ID NO: 1895 - DNA, 101 bp, Homo sapiens
ccaaatgaagttaccaaagcagcagaatctccggaccagaaagacacagawggagggcccaaggaggaggaaagtccagtctgaatccatggggctgaagg

SEQ ID NO: 1896 - DNA, 101 bp, Homo sapiens
gacaatggagtcaatgaatggtggaaaactctattccaatgcatatctgartgatttagcaggctgcatcaaaacattgcgctactgtgcaggttgggctg

SEQ ID NO: 1897 - DNA, 101 bp, Homo sapiens
ctggctacacaatcgaatggtttgaggtgatctcgcaaagttattcttccmccatggccaacaacgaaggacttttctccctggtggcgaggaagctgagc

SEQ ID NO: 1898 - DNA, 101 bp, Homo sapiens
catccttgccaatagtgtcatcctcacagtgaacactcagtggcccatggmattttataggcatacctcctatgggttgtcaccaagctaggtgctatttg

SEQ ID NO: 1899 - DNA, 101 bp, Homo sapiens
taaccaagagataactgtaaatgtgacattgatttgctcttactacagctwcagtgattgggggaggaaaagtcccaacccaatgggctcaaacttctaag

SEQ ID NO: 1900 - DNA, 101 bp, Homo sapiens
cgggtctgggacaatggttatccttgggacatgctgctcgtcactcgattyggaaccttcctcaagaacaatttaccgacagccatctctgactggttgta

SEQ ID NO: 1901 - DNA, 101 bp, Homo sapiens
aacgagatcacgccggtgctgtcgtactcctacctggccgtgctggtgccsgtgttcctgctcaccgactacctgcgctacacgccggtgctgctgctgca

SEQ ID NO: 1902 - DNA, 101 bp, Homo sapiens
tccaggagactgctatcatggcagagaagcccaagctccactacttcaatrcacggggcagaatggagtccacccggtggctcctggctgcagctggagta

SEQ ID NO: 1903 - DNA, 101 bp, Homo sapiens
gtgaaatccgcattgatggcctcaatgtggcagacatcggcctccatgacstgcgctctcagctgaccatcatcccgcaggtaggagcctggcatgggctg

SEQ ID NO: 1904 - DNA, 101 bp, Homo sapiens
caaattttcagaaggttattttctttatcattgctaaactgatgacttacyatgggatggggtccagtcccatgaccttggggtacaattgtaaacctaga

SEQ ID NO: 1905 - DNA, 101 bp, Homo sapiens
tgtatatagaaggtatagcagatttgggtgaaatgatcctccttctgcccktatgtccacctgaggaaaaagatgccaagcttgccttgatcaaagagaaa

SEQ ID NO: 1906 - DNA, 101 bp, Homo sapiens
actggcggaatgaatttgactggaagaagcaggtggagattctcaacagayaccctcacttcaagactaagattgaaggtatgtttgcaaaacgccagcca

SEQ ID NO: 1907 - DNA, 101 bp, Homo sapiens
agaaggtatagcagatttgggtgaaatgatcctccttctgcccgtatgtcmacctgaggaaaaagatgccaagcttgccttgatcaaagagaaaataaaaa

SEQ ID NO: 1908 - DNA, 101 bp, Homo sapiens
cagatttgggtgaaatgatcctccttctgcccgtatgtccacctgaggaamaagatgccaagcttgccttgatcaaagagaaaataaaaaatcgctacttc

SEQ ID NO: 1909 - DNA, 101 bp, Homo sapiens
tatgtccacctgaggaaaaagatgccaagcttgccttgatcaaagagaaamtaaaaaatcgctacttccctgcctttgaaaaagtaagtgaagcagttcag

SEQ ID NO: 1910 - DNA, 101 bp, Homo sapiens
aacaagctgagccgggctgacattcatctggtggaacttctctactacgtsgaggagcttgactccagtcttatctccagcttccctctgctgaaggtgac

SEQ ID NO: 1911 - DNA, 101 bp, Homo sapiens
gacattcatctggtggaacttctctactacgtcgaggagcttgactccagycttatctccagcttccctctgctgaaggtgacccatttcacagcccagag

SEQ ID NO: 1912 - DNA, 101 bp, Homo sapiens
aagtaccaatggttgagattgatgggatgaagttggtacagaccagagccmttctcaactacattgccagcaaatacaacctctacgggaaagacataaag

SEQ ID NO: 1913 - DNA, 101 bp, Homo sapiens
gagccattctgtgtgtgactctgggtggaagtgcccagcccctgcccctaygggcgctgcagcctcccttccatgccccaggatcactctctgctggcagg

SEQ ID NO: 1914 - DNA, 101 bp, Homo sapiens
atccgcgaggaggagcgtcggatattggaaaaagctgggtacttccagagyatcactgtgggtgtggctcccattgtggtggtgattgccagcgtggtgac

SEQ ID NO: 1915 - DNA, 101 bp, Homo sapiens
gagcccctggtgcaatgcggtcacaggttttatgggactttggtgagctgsgcggtcatggttttgaaataaatgtattttgttactttctgattttttgg

SEQ ID NO: 1916 - DNA, 101 bp, Homo sapiens
cagaggaacaaggggtatcagttttgtcctgagtgctttggtatttaatcytcttcccatcatgtttgaagtgatgcttgtcagtggtgttttggtaagtt

SEQ ID NO: 1917 - DNA, 101 bp, Homo sapiens
cccttaatcaaagaagcccttatccacatggaccaaaactttgggaaccgscccgtgacccctatgcgagaacatatctttaagaaaaatggattgattat

SEQ ID NO: 1918 - DNA, 101 bp, Homo sapiens
tgacagctgttttctgcctcaggagaaactgaaaccagaatacctgcaggmactccctgaaatgctgaagctctactcacagtttctggggaagcagccat

SEQ ID NO: 1919 - DNA, 101 bp, Homo sapiens
cctcaggagaaactgaaaccagaatacctgcaggcactccctgaaatgctraagctctactcacagtttctggggaagcagccatggtttcttggggacaa

SEQ ID NO: 1920 - DNA, 101 bp, Homo sapiens
agtttgacagcccagcagggaggaagcatcacacagcgttaggagccgttyccttcaggtgttaaggaaggggatgcccctgaggttctcctggctagtca

SEQ ID NO: 1921 - DNA, 101 bp, Homo sapiens
caggagccacatgccctacacagatgctgtggtgcacgaggtccagagatrcattgaccttctccccaccagcctgccccatgcagtgacctgtgacatta

SEQ ID NO: 1922 - DNA, 101 bp, Homo sapiens
acagcctggatgacaagcaagaccctccctccaaagaaaataaagctcaawtaaaataaaatatgatttgtgttcatgtagagcctgtattggaaaggaag

SEQ ID NO: 1923 - DNA, 101 bp, Homo sapiens
gtgtgcatttgtttgtatacatatatttgtccttcgtatagcaagtttttygctcatcagcagagagcaacagatgttttattgagtgaagccttaaaaag

SEQ ID NO: 1924 - DNA, 101 bp, Homo sapiens
gtgccggtgcaggtctggtgggcggggccagggaaaggcggggtcagggcsgggttcgcggaagaggcgggtataagaatggggggaagatgcgggaaagg

SEQ ID NO: 1925 - DNA, 101 bp, Homo sapiens
cagggaaaggcggggtcagggcggggttcgcggaagaggcgggtataagamtggggggaagatgcgggaaaggaaggggcgtggtggctagagggaagaga

SEQ ID NO: 1926 - DNA, 101 bp, Homo sapiens
gcggggtcagggcggggttcgcggaagaggcgggtataagaatggggggargatgcgggaaaggaaggggcgtggtggctagagggaagagaagaaacaga

SEQ ID NO: 1927 - DNA, 101 bp, Homo sapiens
cttccctcctttgtttacttatatatatattttttttaaacttaaattttrggtcaacttgacaccactaagatgattttttaaggagctgggggaaggca

SEQ ID NO: 1928 - DNA, 101 bp, Homo sapiens
cagaccctgggcaaacagagctactgagacttggaacctcattgctaccamagacttgcactgaagccggacagctgcccagacacatgggcttgtgacat

SEQ ID NO: 1929 - DNA, 101 bp, Homo sapiens
agtcggtggcctttcagcaaagcaagaagtttctgcaaaacacacgccagmttgttcaagaagatcctgttgggcctgttgtgtttgggtgagatattgag

SEQ ID NO: 1930 - DNA, 101 bp, Homo sapiens
aaaaaggactagtataggaatggagcttatcactgatccttccatcttgtycttggatgagcctacaactggcttagactcaagcacagcaaatgctgtcc

SEQ ID NO: 1931 - DNA, 101 bp, Homo sapiens
cagggaggagcaagtccccatggagctggtgcagcggggcgatatcgtcarggtggtccctgggggaaagtttccagtggatgggaaagtcctggaaggca

SEQ ID NO: 1932 - DNA, 101 bp, Homo sapiens
agtaatctcattacttaaatcatatcctagcatgtggaaaagctccctgasttccccgcctgccccacctgctgatttctcaggaccgctgataacagctt

SEQ ID NO: 1933 - DNA, 101 bp, Homo sapiens
cttttccttcagggtgaattgctatggcgtggtaagtgcccagtgcccctwtggtggattcaagatgtctggaaatggaagagaactgtaagattaacgtt

SEQ ID NO: 1934 - DNA, 101 bp, Homo sapiens
gaggcccagaagcaaacctggaggtgagacccaaagaaagctggaaccatrctgactttgtacactgtgaggacacagagtctgttcctggaaagcccagt

SEQ ID NO: 1935 - DNA, 101 bp, Homo sapiens
atcgggcaggcgttcgccatggctgagatgaaggtggtcctggcgctcacsctgctgcacttccgcatcctgccgacccacactgaaccccgcaggaaacc

SEQ ID NO: 1936 - DNA, 101 bp, Homo sapiens
tatgatgtgtttggagcccagtcaccctttggtggctacaagatgtcgggragtggccgggagttgggcgagtacgggctgcaggcatacactgaagtgaa

SEQ ID NO: 1937 - DNA, 101 bp, Homo sapiens
aaccgttaccaatcatttggaaacaatcactttgctgagcgatcattcctractgctcctcagacagagtacaggaataacatgattgttattggcctgta

SEQ ID NO: 1938 - DNA, 81 bp, Homo sapiens
tgtgttgccctcctgaggcttgggggggccggggccacgcygtccacaggctgtggaaaggagttagtcacactgacagca

SEQ ID NO: 1939 - DNA, 101 bp, Homo sapiens
ggggatcatgtactttcattggagtagctgctggtagcaaaggattgactrtttttccagaggagctaataatcggccgtactataaatggaacattcttt

SEQ ID NO: 1940 - DNA, 101 bp, Homo sapiens
gacctaaacttaagttgcatttgaggtttttattttaatcctacaggtgtraataagttaccaccaccaagtgtcatgatagaggaaattaatgcaaggaa

SEQ ID NO: 1941 - DNA, 101 bp, Homo sapiens
gggaattcatggatttcgccgatgctcaatggaaagcacaagtacgaagtwtgttttctctatttctgagttcatccaatggtttttttaacttatttttt

SEQ ID NO: 1942 - DNA, 101 bp, Homo sapiens
ttcgccgatgctcaatggaaagcacaagtacgaagtttgttttctctattwctgagttcatccaatggtttttttaacttatttttttcgcattgcaggag

SEQ ID NO: 1943 - DNA, 101 bp, Homo sapiens
aagtacgaagtttgttttctctatttctgagttcatccaatggtttttttracttatttttttcgcattgcaggagtttgtttaatgaccgaaaattagta

SEQ ID NO: 1944 - DNA, 101 bp, Homo sapiens
gccatgactttcaaggagagagtacggaaccacatcatgcacttggaggamcatttattttgccagtatttttccaaaaatgccctagaaatagcctctga

SEQ ID NO: 1945 - DNA, 101 bp, Homo sapiens
atttctaacactatctgttctttcagtgatgtctccaagattaatgaaggwattggtgacaaaattggaatgttctttcagtcaatggcaacatttttcac

SEQ ID NO: 1946 - DNA, 101 bp, Homo sapiens
tttggatccatttcatgcaggattgtgttgttttaactgttgttgaggaarctaataaataattaaattgtatagaaagtctcttcctcttgatattttga

SEQ ID NO: 1947 - DNA, 101 bp, Homo sapiens
ttgctgtgtcctcacatggtggaaaagggcaagacagctcacagagacctyttttataaggacgccagttccattcaagagggcactgcctgcattccctt

SEQ ID NO: 1948 - DNA, 101 bp, Homo sapiens
ctcatgccccaggcctcatctttcatggaccaggccttgttccaggagtgrgtgttgggtcctctgcttcctgtgctgtcccctggggaaggtcccgagga

SEQ ID NO: 1949 - DNA, 101 bp, Homo sapiens
cacctcaagtcttttgtggccagcctgcaacttgggttatcccacgaagtkacagaggctggtggcaacctgaggtaatgttccatagcctgctacccctg

SEQ ID NO: 1950 - DNA, 101 bp, Homo sapiens
aggacttcaatccccagcatttcctggatgacaaggggcagtttaagaagmgtgatgcttttgtgcccttttccatcggtaagagaccactgtttgctgcc

SEQ ID NO: 1951 - DNA, 74 bp, Homo sapiens
cctttccaccacagatcacttaggaaaatggctgttggtatgatcctagcrtgcctggcattgcagttgggcag

SEQ ID NO: 1952 - DNA, 101 bp, Homo sapiens
acttatcttccacttctcatttcagggagagtggagaagagaagagaacamaaagtaacttcaggtaagattttgtccaatgggctccagctttatttcct

SEQ ID NO: 1953 - DNA, 101 bp, Homo sapiens
aatttttcctctgctattcttttttctctctttttagtttcgctattcaarttggcttgacaagttgtatatggtggtgggaactttggctgccatcatcc

SEQ ID NO: 1954 - DNA, 101 bp, Homo sapiens
acttcataagccttaggaggtgcaacctccacatcctcaatggaaaagggyttctttacctcccatagcacagctgctttgcatttgattacctagaaaat

SEQ ID NO: 1955 - DNA, 101 bp, Homo sapiens
tcagccctgtttgctatttcatgtctgcatggtacgagacaccccttcacrgcatacactgccatggtatgtacatatgcatccacgtgtgtgtatgtgta

SEQ ID NO: 1956 - DNA, 101 bp, Homo sapiens
gctggcggcggcatgcctcccttccacaagcccatgctgctgcagagggascctgtgtttgcaaaacccagtggactgggctgggtctgctgtctgagcag

SEQ ID NO: 1957 - DNA, 101 bp, Homo sapiens
gaagccacggcccacacacgccccaagccgcccaccttggctgaccccacratgataactgccagctgcccgaggaacatgaccagtgtctggaacacatc

SEQ ID NO: 1958 - DNA, 101 bp, Homo sapiens
cgggcccatctccttccctgaggcgcaggagggcctcatgggcatcgggcrgcgccccttcagccaaggcctgcagcagatgatggaccatgtgagtcggc

SEQ ID NO: 1959 - DNA, 81 bp, Homo sapiens
gattctcctgccttagcccccccgagtagctgggattaagrcacccgccatagcgcccgattaatttttctatttttggta

SEQ ID NO: 1960 - DNA, 81 bp, Homo sapiens
ttcagcccagtgagactctgtcagacttctaagctacagawctgtaagataaatttgtgttgttttacatcattaaatgtg

SEQ ID NO: 1961 - DNA, 101 bp, Homo sapiens
ttacaacctcttatatggaaacatcagtgcttcacctgaggaagtgtatgyagtggcaaaattagctggacttcatgatgcaattcttcgaatgccacatg

SEQ ID NO: 1962 - DNA, 101 bp, Homo sapiens
acttttcatcacaccaacctctaacccatctctgacatttgaaatatatarggtgccctttggcaaagaaagaatagaaggagtaattaaggacttcgttt

SEQ ID NO: 1963 - DNA, 101 bp, Homo sapiens
gctcctctgcattgggcctttggagccgcccgctggaagtctctggcagarggacgtccattctgaagacctagtgaacaatttctgctcatttcaggaag

SEQ ID NO: 1964 - DNA, 101 bp, Homo sapiens
gatgttgacaaggcagtgaaggccgcaagacaggcttttcagattggatcyccgtggcgtactatggatgcttccgagagggggcgactattatacaagtt

SEQ ID NO: 1965 - DNA, 101 bp, Homo sapiens
tgggtctgaccgttgtatggtttgacctgatatactccattctcccctgcrcctcctcctctgtgttctctccatgtccccctcccaactccccatgccca

SEQ ID NO: 1966 - DNA, 101 bp, Homo sapiens
caatgtagtacaaacaatctctgtgatgattaacagtatgtcaccacttcwttttttaaaaaggatcacgtctaatgcccattttcccaactattctttcc

SEQ ID NO: 1967 - DNA, 101 bp, Homo sapiens
gcataatggacaatatcaagtatggagacaacaccaaagaaattcccatgraaagagtcatagcagctgcaaaacaggctcagctgcatgattttgtcatg

SEQ ID NO: 1968 - DNA, 101 bp, Homo sapiens
tccttcaggtgttaaggaaggggatgcccctgaggttctcctggctagtcrgggtggcttcacccatcactggtgggttgcaggaacagcacccaggactc

SEQ ID NO: 1969 - DNA, 101 bp, Homo sapiens
tttttacccctcatgaaggtcagaggtggactatttgtacacatacacacrtgcacaccctctcacgtcctccagaggctgaaagactatcagcatcttgg

SEQ ID NO: 1970 - DNA, 101 bp, Homo sapiens
acgatgctcccagagtcgacccacattttggtatagataaggaggcacagyggcatcattccgagggcaagcagtgtggagcatgtggtcatgctgacgct

SEQ ID NO: 1971 - DNA, 101 bp, Homo sapiens
tcttctgctttgtatgcccggatggtccagagcccctggagagaagatgayaagtgggaaaacactggactccgagctggggaaacagacagagaaaacag

SEQ ID NO: 1972 - DNA, 101 bp, Homo sapiens
tgaaacaagtaaagaagaaacaacacaatcatattaatagaagagtcttcrttccagacgcagtccaggaatcatgctggagaagttctgcaactctactt

SEQ ID NO: 1973 - DNA, 101 bp, Homo sapiens
tctcatcttgtctccttgccaggcaccctgggtgactgataagaggcctcygccagattggcccagcaaaggcaagatccagtttaacaactaccaagtgc

SEQ ID NO: 1974 - DNA, 101 bp, Homo sapiens
aactttctacatggtgctcctgaaatcattcctactgaagctagtgaatgrcatcttcacgtttgtgagtcctcagctgctgaagtgagtctccaggcctc

SEQ ID NO: 1975 - DNA, 101 bp, Homo sapiens
gaaccttcctcaagaacaatttaccgacagccatctctgactggttgtacrtgaagcagatgaatgcaagattcaagcatgaaaactatggcttgatgcct

SEQ ID NO: 1976 - DNA, 101 bp, Homo sapiens
aggggcaggtaaggacgctatgacttgcatacctgaggtatgattgacatyttcttccttaaatcgtgaagtccaatttcagttgtcaagatcttatcaat

SEQ ID NO: 1977 - DNA, 81 bp, Homo sapiens
ccgcgcccggcccttaagtaattcttaaaatggcaaggctrgtataacggttcactcggttttgcatcagagactgggagt

SEQ ID NO: 1978 - DNA, 81 bp, Homo sapiens
ttccatctgcaaccttaattcccttttggccatttaacctrtcatattcacaagttccagggattcatgcagggacatctt

SEQ ID NO: 1979 - DNA, 81 bp, Homo sapiens
cctcagcctcccgagtagctgggattacaggcatgtgccamcacgcccggctaatttttgtatttttagttgagatggggt

SEQ ID NO: 1980 - DNA, 81 bp, Homo sapiens
cccaggagttagaggcaacataacaacaactcatctctaaygaaaaaaaaaaaaaaagaaagaaaaaggccaggcacagtg

SEQ ID NO: 1981 - DNA, 81 bp, Homo sapiens
ttagaggctgaagggcccttaaagacatcctaggtccccargttttttgtttgttgttgttttgagacagggtctggctct

SEQ ID NO: 1982 - DNA, 81 bp, Homo sapiens
gtggggaggtaactaacaggagtcttttaattggtttaagyactgttagaggctgaagggcccttaaagacatcctaggtc

SEQ ID NO: 1983 - DNA, 101 bp, Homo sapiens
tgtatcctcagagtggcattctgcatttctgtggcttccaagtcttagaayctcaactgacatatagcattgggcacactccagcagacgcccgaattcaa

SEQ ID NO: 1984 - DNA, 101 bp, Homo sapiens
aattgatggtgtgtcacctcttctctgtattttagagcttgtagccaagayatcgaacctcgagaacgtaaagtttgcttggcataaggagacatcatctg

SEQ ID NO: 1985 - DNA, 101 bp, Homo sapiens
aaatatcggtgtctttggccgaagggactgcaacagttctttataatccckctgtaattagcccagaagaactcagagctgctatagaagacatgggattt

SEQ ID NO: 1986 - DNA, 101 bp, Homo sapiens
tccatcacggtgctgtgcattgcctgcccctgctccctggggctggccacrcccacggctgtcatggtgggcaccggggtggccgcgcagaacggcatcct

SEQ ID NO: 1987 - DNA, 101 bp, Homo sapiens
ccctattccatgctgttatgggtgaaactctgggagattctcctattgacscagaaagcgattccttcactgatacactgtctgcaaacatatcacaaggt

SEQ ID NO: 1988 - DNA, 51 bp, Homo sapiens
tttagtggaaaataggctttttaatyatgaatatgatgacaatcagttata

SEQ ID NO: 1989 - DNA, 101 bp, Homo sapiens
attcattcattcattcattcattcactcaggcttagagaaacctccaggasactgctaccatggcagagaagcccaagctccactactccaatatacgggg

SEQ ID NO: 1990 - DNA, 101 bp, Homo sapiens
ggcaacaagcctgtatgctgagcaggaggcagacttgcagagcttgttttktttcatcctgtccgtaaggggtcagcgctcttgctttgctcttttcaatg

SEQ ID NO: 1991 - DNA, 101 bp, Homo sapiens
tgttcttgggttccaggagcctctactcattttgagaattcctttgagggytcatcatttgcagtgggtgacattgccctggcactgtactcagctctgtt

SEQ ID NO: 1992 - DNA, 101 bp, Homo sapiens
ccatggagttgggcttagaggctatttttgatcacattgtaagaagaaacyggggtgggtggtgtctccaggtcaatcaacttctgtactgggctctgacc

SEQ ID NO: 1993 - DNA, 101 bp, Homo sapiens
ctcagcccaccaatgaaagccactctatcaaagccatcctgaaaaatgtaygtaggggaggttatcctatcttctaccccttgtcctctttctctcctcct

SEQ ID NO: 1994 - DNA, 101 bp, Homo sapiens
cccatctctgccatctgtctgtctggcaatggaaggagcttcagcaggagrtccttcccagaaggttgattcttggcctgggtggtagaggagatatcctg

SEQ ID NO: 1995 - DNA, 101 bp, Homo sapiens
aagggggagacatttttaaaaccaaataaaatgctgagagatgccaacgargtaaaggaaaggcctgctcaggtcccagaagagacccagatctctcctac

SEQ ID NO: 1996 - DNA, 93 bp, Homo sapiens
cgtctgttcaccacgcaccttgaagcagtcctgtagagatcaytgctccacgggcttcagttttccaggggtatctgaccctgctttccagac

SEQ ID NO: 1997 - DNA, 81 bp, Homo sapiens
cctataatcccagctacttgggaggttgaggcacaagaatkgcttgaacccgagagggggaggttgcagtgagctgagatt

SEQ ID NO: 1998 - DNA, 101 bp, Homo sapiens
aggtaggactcttggacacaaaattacctttcattccataataggaaaagygctcgcagaattcattcaccacaatgaaggcaatgctcagtggatagttg

SEQ ID NO: 1999 - DNA, 101 bp, Homo sapiens
gatcatgttcccctggatgtgaggaatgtgcttatctgctggaccccgcakatcctctgtctttacaggaacatagtagtagcccatgatggagaagatca

SEQ ID NO: 2000 - DNA, 101 bp, Homo sapiens
cttgattcttcttatactacttactcctgcacatctaattgactctagttwagcatttcaaccaggtttctgttacttgtgttttctatgtattttatact

SEQ ID NO: 2001 - DNA, 101 bp, Homo sapiens
ctgaatgctacttcctttgatgtggttttaacagaccccgttaacctctgyggggcggtgctggctaagtacctgtcgattcctgctgtgtttttttggag

SEQ ID NO: 2002 - DNA, 101 bp, Homo sapiens
ctgtgtttgctattttcaggaaaacggatttgtgtgggagaagccctggcyggcatggagctgtttttattcctgacctccattttacagaactttaacct

SEQ ID NO: 2003 - DNA, 101 bp, Homo sapiens
ccagatggatttgagggaaaacgcatcctggtgattggaatgggaaactcrggctcagatattgctgttgagctgagtaagaatgctgctcaggtgtgatg

SEQ ID NO: 2004 - DNA, 101 bp, Homo sapiens
tgtagcctgccctcagagagaactatgatgatggacattatcaaaaggaakgaaaaaagaattgacctgtaagaattttttttaattctttacatgaagca

SEQ ID NO: 2005 - DNA, 101 bp, Homo sapiens
gttgggcctgggcaatgggaaggagccagaaatgccatcttcacccagaarcaaagaatactgaagccactcaagactcgggccctgaaggattcatctaa

SEQ ID NO: 2006 - DNA, 101 bp, Homo sapiens
gcagaaacacaattaaagtctgtgattgccttgtagatcattgctacctcyctgtgccatactgatgccactgttatcgattctaaatttgagggcctagc

SEQ ID NO: 2007 - DNA, 101 bp, Homo sapiens
ggggatggtgagatgacccatgcgagctagaccctgcggtgatcagcagtyacattgcacatctttctgatgttgccctttcaattacaaatgtatgaaag

SEQ ID NO: 2008 - DNA, 101 bp, Homo sapiens
caccagattgataccttaataatgacttcagcatggtttcaaaagggtccrctgaaacagacaaattaaatatttctgtatcaaaataatcactcaaaaag

SEQ ID NO: 2009 - DNA, 101 bp, Homo sapiens
agccttaacttgcctccaccccaggtctatgaccccttccgcttcgacccmgaaaacgcccagaagaggtcacctatggcttttattcctttctcggcggg

SEQ ID NO: 2010 - DNA, 101 bp, Homo sapiens
gcagaaacaatgagatcattttatttaaaggagtatttcctcctctacttsagaagtcaaccatagcagtgattggctttgtccagtcccttggggctgcc

SEQ ID NO: 2011 - DNA, 101 bp, Homo sapiens
gatgagctcccagcaagcattctgtgtggcattgtgtccgtaaagcctaaygtgaaggaattcacagagacctcggccatttttgaggatgggaccatatt

SEQ ID NO: 2012 - DNA, 101 bp, Homo sapiens
cgcatcgcctgggggaaattcatgaacagtggccagacctgcgtggccccwgactacatcctctgtgacccctcgatccagaaccaaattgtggagaagct

SEQ ID NO: 2013 - DNA, 101 bp, Homo sapiens
cgtggccctagcacctacaagatcccggcatttggcagcatccccattgarttcagggtgtccctgctccgcgactgccccaacaagaaggccatctatgc

SEQ ID NO: 2014 - DNA, 101 bp, Homo sapiens
ttggagaaggccttcaggtcggccacctgtgggttgtactggctcccctcrtttgcagtcagccctgccaccagcttcctcttctcagcctccggcatccg

SEQ ID NO: 2015 - DNA, 101 bp, Homo sapiens
gaatggacaaaaacagagagaggggccccgcacctcagggtccggccacayagctgggttgtgatgggttccgaaaacactgatgaggcagataatgcctg

SEQ ID NO: 2016 - DNA, 101 bp, Homo sapiens
cttttttcttttgttcaacattgtaagaacaatcaatgctgttattactgwtcccaccatgattgatgtggggtaaatattaaggagatggcctcatggga

SEQ ID NO: 2017 - DNA, 101 bp, Homo sapiens
catatcaacatgtgataccatcaatttctagtccgtggttggttgatccgytgaagtaagtcatctgagtggcctcgacctctgcttctgcattgatgatc

SEQ ID NO: 2018 - DNA, 101 bp, Homo sapiens
tttggtaaaaatagttattttttcccacatcctatcagaacaatattattmttattattttttattacactttaagttttagggtacatgtgcacaacgtg

SEQ ID NO: 2019 - DNA, 101 bp, Homo sapiens
tttagaatgggtatcaccatttccccagtcagtcaccgcctctgcgctgtwcctcaggtgtaatattgttaagaaagaaaggggcaaggaaagcaagaaga

SEQ ID NO: 2020 - DNA, 101 bp, Homo sapiens
caaaccagataatattaagggaaatttggaattcagaaatgttcacttcarttacccatctcgaaaagaagttaaggtacagtgataaatgattaatcaac

SEQ ID NO: 2021 - DNA, 101 bp, Homo sapiens
gccttaaggatgatgttgtgatgggcactctgacggtgagagaaaacttamagttctcagcagctcttcggcttgcaacaactatgacgaatcatgaaaaa

SEQ ID NO: 2022 - DNA, 101 bp, Homo sapiens
ggtggtgggggccaggcacgaggtccgcagccagggaggacgacagcatcygccctttcaaggtggaaacgtcagatgaggagatccacgtaaggcacctt

SEQ ID NO: 2023 - DNA, 101 bp, Homo sapiens
ttcaactccaactacctgaagaaagtcatctcctactggcggaatgaattygactggaagaagcaggtggagattctcaacagataccctcacttcaagac

SEQ ID NO: 2024 - DNA, 101 bp, Homo sapiens
atatgtatatagaaggtatagcagatttgggtgaaatgatccttcttctgycctttagtcaacctgaggaacaagatgccaagcttgccttgatccaagag

SEQ ID NO: 2025 - DNA, 101 bp, Homo sapiens
aggatcgccattgcacgtgccctggttcgcaaccccaagatcctcctgctsgatgaggccacgtcagccttggacacagaaagcgaagcagtggttcaggt

SEQ ID NO: 2026 - DNA, 101 bp, Homo sapiens
gattcatttttacatgtttatttttaatggagactaaagagacataaatgktatgtttgttttgtggtggtctaggtgatatcaatgatacagggttcttc

SEQ ID NO: 2027 - DNA, 101 bp, Homo sapiens
ccattgtgatagctcatcgtttgtctacagttcgtaatgctgacgtcatcrctggtttcgatgatggagtcattgtggagaaaggaaatcatgatgaactc

SEQ ID NO: 2028 - DNA, 101 bp, Homo sapiens
gccaatgatgctgctcaagttaaaggggtacgtgcctcctttctactggtrtttgtcttaattggccattttggaccccagcatgaaactaattttctcct

SEQ ID NO: 2029 - DNA, 101 bp, Homo sapiens
ctgctgccaccatgccagtcctgctcctcactggcctttttctcttggtgyggaattatgagggcacatcctcaataccaggtaagtcagtcatttatttc

SEQ ID NO: 2030 - DNA, 101 bp, Homo sapiens
ctgctgcagggaagggactgggacactcacggagatccactgcttcctgtygccgacccactcctcggcccctgccaggcggcgttgcttgtacttggaga

SEQ ID NO: 2031 - DNA, 101 bp, Homo sapiens
ggtggtgatgattccaagctatgttcttcatcatgacccaaagtactggasagagcctgagaagttcctccctgaaaggtaggaggcccctgggaagggag

SEQ ID NO: 2032 - DNA, 101 bp, Homo sapiens
aagaatcaaggaagattttcaggttttaataaaccagccatagaggtcaaraacatgcaagaccagtattctaaagttttgcaacaattaagtgctttacc

SEQ ID NO: 2033 - DNA, 101 bp, Homo sapiens
atgctgtaatggtttgttccggacatcatgtgtatcccaacctaccaaaaragtcctttccaggtaaggccaaaatttaagctgctagccacataactgac

SEQ ID NO: 2034 - DNA, 101 bp, Homo sapiens
aggaaagcgtctcctggccactcgcacctgactcatgtgctctgagtgccrcaccttgcttggcatttgtccttcatagccctggtcattgctggctaatg

SEQ ID NO: 2035 - DNA, 100 bp, Homo sapiens
tgatgggttctgtttggatagattgagtttgagtgtcggtaaaatatctragagttggggtcccacagatgcttaacatcttaaagcagatcttttcttc

SEQ ID NO: 2036 - DNA, 101 bp, Homo sapiens
cttcttcagggtgtttgcaggagtctccttggttggccttatactgtggtkggctttagacacagcccaaaggccagagcagctgatcccctttgcaggaa

SEQ ID NO: 2037 - DNA, 101 bp, Homo sapiens
acgtaggtggtgaaggtcacaaacacgatgattttgcttgcactgaaaaaygaagccaaattcatccctctgaggcaggaacttctcagaatcttggaaat

SEQ ID NO: 2038 - DNA, 101 bp, Homo sapiens
aaattcatccctctgaggcaggaacttctcagaatcttggaaatctccttmctgaaagagagtacaggtttttaaaaaagcagtgatgtcaaccagataaa

SEQ ID NO: 2039 - DNA, 101 bp, Homo sapiens
ggcccacactagaagcgtgtggcgttggccctgcttgaagtcgtcagttayagcagtgactggtgatccaggagaagaaatgtttatccttgtcagtttgt

SEQ ID NO: 2040 - DNA, 101 bp, Homo sapiens
aaaatccaaaaaagtagattttgaactagcagtgcaaaatatcgtttatcrtacaggtaaagaatattttcagatagtccattcgaaatccaacattggaa

SEQ ID NO: 2041 - DNA, 101 bp, Homo sapiens
tctctgatctggctcagagcaaaaggtcacctggtcggtggaggagagcgkggtgttaaagtcccgggagaggaggcgcagagtgtgagggcatcggcgcg

SEQ ID NO: 2042 - DNA, 101 bp, Homo sapiens
catgaacacacacgcaggcccgcctaccccacgcgtaccttctcgccaccrtgcacatgcagactcaggtctctcagcaccaggtctaggcccggccggta

SEQ ID NO: 2043 - DNA, 101 bp, Homo sapiens
ggaggagcatcagaccacagatcctggaaggcacttctctccctgactgcygctcacactgccgtgagaacctgcttatatccaggaccaaggagtgagtg

SEQ ID NO: 2044 - DNA, 101 bp, Homo sapiens
agttgctcctctgatacttgagggttatgtgaatctaacaacagacaaaartctctgcctcctggggcttatattctttgggaagagacaagcactaaaca

SEQ ID NO: 2045 - DNA, 101 bp, Homo sapiens
aatcatcttagtggtgtcaagttgacccaaaatttaagtttaaaaaaaatrtatatataagtaaacaaaggagggaagggaaaaagggcccaaggagacca

SEQ ID NO: 2046 - DNA, 101 bp, Homo sapiens
catcttagtggtgtcaagttgacccaaaatttaagtttaaaaaaaatatayatataagtaaacaaaggagggaagggaaaaagggcccaaggagaccaaaa

SEQ ID NO: 2047 - DNA, 101 bp, Homo sapiens
tgaagtcatttcatcaatgagaacagtggctgcttttggtggtgagaaaaragaggttgaaaggttggttaattggaatctgattctttccttaatttcat

SEQ ID NO: 2048 - DNA, 101 bp, Homo sapiens
cttaccctcaggcgagccctttgaccccacgtttgtgctgagtcgctcagkgtccaacattatctgttccgtgctcttcggcagccgcttcgactatgatg

SEQ ID NO: 2049 - DNA, 101 bp, Homo sapiens
ataggggagactcccatagtaccattggggctttcttacattgatgatttygctaaagaaggacattcttctttgtatttaggtaatgtacacaaaatatt

SEQ ID NO: 2050 - DNA, 101 bp, Homo sapiens
tggaagaagcaggtggagattctcaacagataccctcacttcaagactaarattgaaggtatgtttgcaaaacgccagccagagagggatgtatgtcatga

SEQ ID NO: 2051 - DNA, 101 bp, Homo sapiens
cgtaccactgaatcctggtgtcagctctgccagacgctgggagtaaaaggygctggactgggtcagcttcaggctcttcaggtgctgctcaaaaatctccc

SEQ ID NO: 2052 - DNA, 101 bp, Homo sapiens
ggaacagcaatggtgcagtgagtctccaggtagaagtgctcttggccaccratgtatatctcccctggggaagcagtgagatccctcacagtgagcccaat

SEQ ID NO: 2053 - DNA, 101 bp, Homo sapiens
tcaacgtggcctctttcatcacagagctcatctattctgcccataaaatcrgccaagaccttcaaagaaaacaaccgcaaaagacacattttaaagccgtt

SEQ ID NO: 2054 - DNA, 101 bp, Homo sapiens
tattctctccaatacataacttttaatgtaagcaaaattttcagctatttyattatgacttcctgggagataatcgatgagagcagggaaattattgcaga

SEQ ID NO: 2055 - DNA, 101 bp, Homo sapiens
cattttttctgggggaggcagcgaaggatttctgatctgtgggatactcaytgctttgaatacctacggggaaatcaattgtcatggttaaaattttgaaa

SEQ ID NO: 2056 - DNA, 101 bp, Homo sapiens
tttggtaggacagttggcagaaaagagttaaagtgaaaattggaatttcaytggaattcatgtattggtttcagtaccaagtgactggtggcccaattctt

SEQ ID NO: 2057 - DNA, 101 bp, Homo sapiens
gtccagtgatacccactagatcttccaaggaaaaacataattctttcaaayggtgtgtatttggcaaagagctcttcaaatctgggagagggacttcctca

SEQ ID NO: 2058 - DNA, 101 bp, Homo sapiens
catcatgagggggagacctgatccgtgagctatggccatgatggtacccarcgacataaacaatttatcctgccaatcggagtatcgaaactaaaaaaagg

SEQ ID NO: 2059 - DNA, 101 bp, Homo sapiens
agggctcttacattctttgcaaaattttcaagagtaaattcattgggtttrgggaaaaactcgagtctgtgcatccttccaatattcaggataatgtttgt

SEQ ID NO: 2060 - DNA, 101 bp, Homo sapiens
actccttcctccctcctaaacttggactcctccacctccgggtagaccagyttggagagggccaaggcacaaggggcagccatcacagaggctgcaatcaa

SEQ ID NO: 2061 - DNA, 101 bp, Homo sapiens
actgtcaatattaattcttaccttttcccactatctcaggtgatgctctaytgagtgataaaatttgattaattaaacaagtggataaggtcgatgttgaa

SEQ ID NO: 2062 - DNA, 101 bp, Homo sapiens
aatggctctggtctgcaccagcttcatcccgtcaatctcaaccattggtayttgctggaacagcaaactcccatcttagaaagaagaaaaaaaaaggagta

SEQ ID NO: 2063 - DNA, 101 bp, Homo sapiens
agaccccacaacggcttcacctccttgtgttccaggcagccggtgaaggtygtgtactcctccaaggatcctgcccagccgaaagagagttccaaggtgga

SEQ ID NO: 2064 - DNA, 101 bp, Homo sapiens
ccgtggcagtatccaggattagaaccattgcttcattaaataaagtacctytgttgctataaaccagatggagactgtggtgctattttgtattttttttt

SEQ ID NO: 2065 - DNA, 101 bp, Homo sapiens
gatccagaaaagtttaagccagaacacttcctgaatgaaaatggaaagttyaagtacagtgactatttcaagccattttccacaggtgagaaagatcagag

SEQ ID NO: 2066 - DNA, 101 bp, Homo sapiens
atgagcagcaagaagccatagcgcagggtggtgctgaccgtctcggtgccygcaatgaagaggttcaacgtgctcatcatcaggttcttcaagtagaactc

SEQ ID NO: 2067 - DNA, 101 bp, Homo sapiens
cctttccccgaggcgccatcagcagcgaggccgtgtgcaagccactgtgcrcgcggcagtccttcaccctggcccgggaggcctgccgctcctacagccac

SEQ ID NO: 2068 - DNA, 101 bp, Homo sapiens
aaaagaaaatcctttaactgacttcatcttaaccttttagttcctaaggayggtctgaagagccaagagctatttgatgaaattagaatgacctacatcaa

SEQ ID NO: 2069 - DNA, 101 bp, Homo sapiens
cccctctccctgcaggaggagaagaaccccaacacggagttctacttgaaraacctggtgatgaccacgtagaacctcttcattgggggcaccgagaccgt

SEQ ID NO: 2070 - DNA, 101 bp, Homo sapiens
ccactgtgctcttcccacagccactgctgcccaccagagccagcgtctggsccttcttcacctccaggctcagtccctgaagcactgggatgtccggtcgg

SEQ ID NO: 2071 - DNA, 101 bp, Homo sapiens
atctgcaaatgcttacctccacagaatcaaatatcactgctggtacagctrtgttgttcatttttgcagctttttggatgatatcttcagcctctctaaat

SEQ ID NO: 2072 - DNA, 101 bp, Homo sapiens
tgaagggcaaataacaaggagaaaaggatacaacaacaaacaaataaacartaaaacaaaacccacattacagctttgagagaaaagacaacgttgctcat

SEQ ID NO: 2073 - DNA, 101 bp, Homo sapiens
taaaccagcagtgaaccctgtagaatgccttggatcccagcactcagtccrcttccctgagttggatatgatgttagcaaataccaccatctagaaagaca

SEQ ID NO: 2074 - DNA, 101 bp, Homo sapiens
caaaactgaattcttatgcagaatttcctagcccatagatgacaacctgastttctgtatgttaaagtagatgtaatgaattattattattacagtggtca

SEQ ID NO: 2075 - DNA, 101 bp, Homo sapiens
aagacaggaggactgcttgaggcctcacgtcaagttcaacatcagcgtggscaacaaagtgagaccctgtctctacataaaagtaaaatcaaaagtctctg

SEQ ID NO: 2076 - DNA, 101 bp, Homo sapiens
aaggaggccacttgctggcagaggaagaggaagagtgcgtagaggcagagrggggtgcccacggcacgcaggtaggccaggtgcactgtggccttcacctg

SEQ ID NO: 2077 - DNA, 101 bp, Homo sapiens
tctgcttcattcctgtctgaagaagggcagatagtttggctgctcctgtgytgtcacctgcaattctcccttatcagggccattggcctctcccttctctc

SEQ ID NO: 2078 - DNA, 101 bp, Homo sapiens
caggaggccccgaccagcaggaggagcagccaaggggatgctgccactggscagaggcccagccaggacaggctcagctgggacatcctgcagggcagacg

SEQ ID NO: 2079 - DNA, 101 bp, Homo sapiens
ccgcccgcctgcagcgcctttccccgaggcaccatcagcaagcaggacgtrtgcaagacactgtgcacgcggcagccattcagcctggcccgggaggcctg

SEQ ID NO: 2080 - DNA, 101 bp, Homo sapiens
gtctgtctgctcctgaccctaagctcaagagataagggaaagctgcctccrggacccagacccctctcaatcctgggaaacctgctgctgctttgctccca

SEQ ID NO: 2081 - DNA, 98 bp, Homo sapiens
cctgtgctggctatcacagatcctgacatgatcaaaacagtgctagtgraagaatgttatctgtcttcacaaaccggagggtaagcattcatgtgttg

SEQ ID NO: 2082 - DNA, 101 bp, Homo sapiens
tacgccttctatgacaactgccgccgccttcggtgtttcccacaacccccragacggaactggttttggggacaccagggcatggtgagtgtggcagcagg

SEQ ID NO: 2083 - DNA, 101 bp, Homo sapiens
tctttcacctgcctccatggcccctgattgtcctcatttatgtcagctgcsattgcaccaaaggacaagttcttctacagcttcctggagccctggctggg

SEQ ID NO: 2084 - DNA, 101 bp, Homo sapiens
cggagctggtcctgcgcgcagagggcggactttggctgcgggtggagcccmtgagctgagttctgcagagacccactctgaccccactaaaatgacccctg

SEQ ID NO: 2085 - DNA, 101 bp, Homo sapiens
tgtctaagcagggacgaacaatcatcttctccattcatcagcctcgatatyccatcttcaagttgtttgatagcctcaccttattggcctcaggaagactt

SEQ ID NO: 2086 - DNA, 101 bp, Homo sapiens
agacacgattccgagttgagctctgagccactggacattgagtttctttgyttcttgaccatcgagaagctgaaaaccaaagtccacaaactataagaagg

SEQ ID NO: 2087 - DNA, 101 bp, Homo sapiens
aaaccaaataaaagttcatttccaaggggaatcaggagcgagccacaccckaatggtagaaagatctcagggttaactctttatttttgtagttttattat

SEQ ID NO: 2088 - DNA, 101 bp, Homo sapiens
agatcatagagccttccaagcaggataagccactcatagaaaaattagcgkagatttatgtcaactcctccttctacaaagagacaaaagctgaattacat

SEQ ID NO: 2089 - DNA, 101 bp, Homo sapiens
tattaaatatctgtgtgtttccaagagaagttacaaattttttaagaaaakctgtaaaaaggatgaaagaaagtcgcctcgaagatacacaaaagcaccga

SEQ ID NO: 2090 - DNA, 101 bp, Homo sapiens
actccaaaactgaaactgtggatggcagccatgaaggaagatcccacagtytcagccctgcttactagtgagaaagactggcaaggtttcctagagctcta

SEQ ID NO: 2091 - DNA, 101 bp, Homo sapiens
ttcagcccagctgaggcctgtctgcagaatcgacaccaaccagcatcatgyccatgacactggggtactgggacatccgcggggtgagtgagggtccgctg

SEQ ID NO: 2092 - DNA, 101 bp, Homo sapiens
cccgtgcggaattgttcctcttcttcaccaccatcctccagaacttctccrtggccagccccgtggccccagaagacatcgatctgacaccccaggagtgt

SEQ ID NO: 2093 - DNA, 101 bp, Homo sapiens
gacaccagggtaggggtgagttgtggtaacgttgcaggaactattgttttsttaccaggattttcagaggtttcttgtgagactcctgtagtggcctgctg

SEQ ID NO: 2094 - DNA, 101 bp, Homo sapiens
ttccaggccctctctttgctcctttgcaggttgctcatcaagttcgtgaaygacacgaaggccccagactggcagggctacttctacaccgtgctgctgtt

SEQ ID NO: 2095 - DNA, 101 bp, Homo sapiens
ggtgctatctatgtattaagttgggtcctaagttgggtcttttgtgtcaamgagatcatctcttctagaaatatcaaccttttttgtccagtaaataattg

SEQ ID NO: 2096 - DNA, 101 bp, Homo sapiens
ccatcctaatcttctccggggtcagtggactattaagggtcaagggtccaygcaggcctctctcctgtcgtgctgcactcactgcgtcatggatagcgaaa

SEQ ID NO: 2097 - DNA, 101 bp, Homo sapiens
tctctagctggctccacgggagttcaggccccactccccctgaagctgccyctccagcacacacacataagcactgaaatcactttacctgcaggctccat

SEQ ID NO: 2098 - DNA, 101 bp, Homo sapiens
ccaaatgcagaagtggttctcatctttttttgcagcttaagatctgccttrgtatttgaagagatataaactagatcaatttctttcacaggatcaactaa

SEQ ID NO: 2099 - DNA, 101 bp, Homo sapiens
atagtgattgccccacagaggatacagtttggcagctcatcattcacaatraattttgcttttttcctttgacacacaggagaaaattattcactgtagtt

SEQ ID NO: 2100 - DNA, 101 bp, Homo sapiens
ccaataaaagccacagaattcatcacaaacgcaaggatgatgaagaatatygaaaacaatcctattgcttgtaggtactccaggtagatggagaacttcac

SEQ ID NO: 2101 - DNA, 101 bp, Homo sapiens
ccagtacttgctggtacctcttttcattaaactctgttccaaaaaggatgytgtcctttatggtgccattctgaatccaggactgctgtgggacataggca

SEQ ID NO: 2102 - DNA, 101 bp, Homo sapiens
ttggggctgcagttttgtggttgaggggcctggagaaaatcattttctccycttggcagtgtcccagggccctggatggtcctcttaccaacatctggtct

SEQ ID NO: 2103 - DNA, 101 bp, Homo sapiens
tcttgaaataatgatctgaccgcctgttagaccagtgaagggaaggaattygggttgatttaagaagagaatcctcatggtcatggtagactgatatggag

SEQ ID NO: 2104 - DNA, 101 bp, Homo sapiens
cggacagagacccgggggatccagtttgaagatttcgtgcgctacctcggygatccgaaccacagatggctagaccttcagtttggggaccacatcattca

SEQ ID NO: 2105 - DNA, 101 bp, Homo sapiens
cacagatggctagaccttcagtttggggaccacatcattcactgggtgacrtatgtagagctctgtgctccctgtgagataatgtacagtgtgattggaca

SEQ ID NO: 2106 - DNA, 101 bp, Homo sapiens
gaggtgacctttgagaacgcagagatgaggtaccgagaaaacctccctctygtcctaaagaaagtatccttcacgatcaaacctaaagagaagattggcat

SEQ ID NO: 2107 - DNA, 101 bp, Homo sapiens
tgagagtttagctggcgagaggactgtaagtgccccaaatcaaacaggggkctagagaccatctcttcgcttggagccagaggagctaatgtgggccccat

SEQ ID NO: 2108 - DNA, 101 bp, Homo sapiens
gtgtttacgacaacttacccaaaaaatacggaattatatatcctacaagcyccttgtgctccacagctgttggtggaccacttcatacatgttttatcaat

SEQ ID NO: 2109 - DNA, 101 bp, Homo sapiens
ttaaactttacctgaataaattcctaagtaccagttaagatctagcttctyggttacatttcctcctccatttacagtgacatttagcatactttgtttgt

SEQ ID NO: 2110 - DNA, 101 bp, Homo sapiens
atttagtctccatttattttttcccttggcttagctctccatttaaaaagrtttctttccactggtgtgcaaatacctcgtagtatttagaggacagtggt

SEQ ID NO: 2111 - DNA, 101 bp, Homo sapiens
agaggcagcatctgcagaggagcctggtgggcagcacgtgccgcgggggcrggaaggggagagcttccgggaaggggatggaacttgagccaaaccttttt

SEQ ID NO: 2112 - DNA, 101 bp, Homo sapiens
caccctctctcactgtgtcatttctgaagggccctggtgactttctttgcscctctccactcttacagtcattggaaccagagggcagaaccccgggcctc

SEQ ID NO: 2113 - DNA, 101 bp, Homo sapiens
tacaacctctcccgcaagacccacatcctcatcctggccaccacgcgcagyggctcctccttcgtgggccagctcttcaaccagcacctggacgtcttcta

SEQ ID NO: 2114 - DNA, 101 bp, Homo sapiens
gcacccagcaggctgccagcaatggtggcgtaacctccggtcatgacaacrtggacttcagagagtgtcatgtctgccaagtagggccggatcagtaatgg

SEQ ID NO: 2115 - DNA, 101 bp, Homo sapiens
tggaaagggtggtctttaaatccttatgtttttctcatcaggttacaagaygagaagaaaggtgatggcgttagagttggcttctttcaattggtaataaa

SEQ ID NO: 2116 - DNA, 101 bp, Homo sapiens
ctcagcccagggctggacactgaggagaagcagcagtcctgtggccagccrcggcaggggaacctggagtcctgtggccatctcagcagaagacacggaca

SEQ ID NO: 2117 - DNA, 101 bp, Homo sapiens
tttaataatgcttttttttttttaattttcctatccagtgacaagaggaamcaagaacctcagttcaggggaaacacagcaaggaaatgtgagccccaggc

SEQ ID NO: 2118 - DNA, 101 bp, Homo sapiens
ggaattaaagattcaaacagtgaatgtggtaggcagggcctgaaacggtttgtaacctctacctgactgacaagtgccagcctccctttcatgtcatggaa

SEQ ID NO: 2119 - DNA, 100 bp, Homo sapiens
ggaattaaagattcaaacagtgaatgtggtaggcagggcctgaaacggttgtaacctctacctgactgacaagtgccagcctccctttcatgtcatggaa

SEQ ID NO: 2120 - DNA, 101 bp, Homo sapiens
agccttaccctccacctctgggtgcttcatgagcagcaagaagccatagcrcagggtggtgctgaccgtctcggtgcctgcaatgaagaggttcaacgtgc

SEQ ID NO: 2121 - DNA, 101 bp, Homo sapiens
tgaaacttcgaagccaacaaaataaaaccaacaaaagtatgtttaccttargtaggggtttggcaggtttgcagtggaatcctccaacaaaatcaacgttt

SEQ ID NO: 2122 - DNA, 101 bp, Homo sapiens
ctatgagatagtctgcctggtcaatgctgagctgtaccccacattcattargtgagtgcattttccttagaatgacgagggtgggtgagacatttgttcat

SEQ ID NO: 2123 - DNA, 101 bp, Homo sapiens
tacttgctatcctgccttggtgttggcgtcactggggttgtggtggccttygcaccaaacttccctgtgtttgtgatcttccgcttcctgcaaggtgtatt

SEQ ID NO: 2124 - DNA, 101 bp, Homo sapiens
aagggggccgctttcgagctgtgtcaactgagattcaacacagtgttcaaygcggagactggaacctgggagtgtggccggctgtcctactgcttggaaga

SEQ ID NO: 2125 - DNA, 101 bp, Homo sapiens
cacgctggatcccaattccccacaggacttcatcgactcctttctcatccrcatgcaggaggtacaccccagcagccagtgcggggaggtgcaaagccagg

SEQ ID NO: 2126 - DNA, 101 bp, Homo sapiens
ttagaaatctccaagtcatccacgttttccctgttttatttgcagccattygttatctatgacatgaattccttaatgatgggagaagataaaatcaagtt

SEQ ID NO: 2127 - DNA, 101 bp, Homo sapiens
gctttcttgttggtaatcagctgagccttgcagatgtgattttactccaarccattttagctctagaagagaaaattcctaatatcctgtctgcatttcct

SEQ ID NO: 2128 - DNA, 101 bp, Homo sapiens
tatgatttggttcatgggtccagcctgtggatgctgtgtactgacgtagcrctggaattcccaagacccactctgcctaatgttgtttatgtaggaggaat

SEQ ID NO: 2129 - DNA, 101 bp, Homo sapiens
gaactaatgggatctacgaagctatttaccacggagtccctatggtgggarttcccatgtttgctgatcagcctgataacattgctcacatgaaggccaaa

SEQ ID NO: 2130 - DNA, 101 bp, Homo sapiens
gagtagtgtagtcctattaattccagacaaaaggagtttaacaaaaacacrtctcccatcctgtttccaaattttctatttctctacctgcgataagccta

SEQ ID NO: 2131 - DNA, 101 bp, Homo sapiens
ctccgtggcctatgtgccacagcaggcctggattcagaatgattctctccragaaaacatcctttttggatgtcagctggaggaaccatattacaggtccg

SEQ ID NO: 2132 - DNA, 101 bp, Homo sapiens
cagcattgtggagaacttgatatttagttactgatgctcttccaggacacraaaagaacccatctttgaatatcaatgattttttttttttaagtactgtt

SEQ ID NO: 2133 - DNA, 101 bp, Homo sapiens
gattggcccagcaaaggcaagatccagtttaacaactaccaagtgcggtaycgacctgagctggatctggtcctcagagggatcacttgtgacatcggtag

SEQ ID NO: 2134 - DNA, 101 bp, Homo sapiens
tatatttttatcacgttcagtgtgctgggatgaggttacgagtagccatgkgccatatgatttatcggaaggtaagtgacattcagcattaaacatgtacc

SEQ ID NO: 2135 - DNA, 101 bp, Homo sapiens
aaatactactttctcaaaatggaagcccttaaaggtgctttgatactgaargacacaaatgtgaccgtccatcctcctttagagttgcatgacttggacac

SEQ ID NO: 2136 - DNA, 101 bp, Homo sapiens
taaatgtttattaatagtcatggttcgtattttaggtgactgaaattgcawcagtgatcataatgaggtttgttaaaacgatagctatattcaaaatgtct

SEQ ID NO: 2137 - DNA, 101 bp, Homo sapiens
tagaggggagaaagtttgtttctaggatctaatttcagtttttaggtcacycaagccagtgggagtcacatattgctaatggcttgagcacagagatcaaa

SEQ ID NO: 2138 - DNA, 102 bp, Homo sapiens
ggcccacattagctcctctggctccaagcgaagagatggtctctagccccctgtttgatttggggcacttacagtcctctcgccagctaaactctcacactc

SEQ ID NO: 2139 - DNA, 100 bp, Homo sapiens
ggcccacattagctcctctggctccaagcgaagagatggtctctagccccgtttgatttggggcacttacagtcctctcgccagctaaactctcacactc

SEQ ID NO: 2140 - DNA, 101 bp, Homo sapiens
ccacctagggagaatttcccattgtattggaaagggtggtctttaaatccytatgtttttctcatcaggttacaagatgagaagaaaggtgatggcgttag

SEQ ID NO: 2141 - DNA, 101 bp, Homo sapiens
cactttacacacagtatccctaatcctaataacacccttattttatagatycaatgactgagtcaagaattacataacctggccagacagctggtacatgg

SEQ ID NO: 2142 - DNA, 101 bp, Homo sapiens
ggaggaattaatcagaaagaagaaagtcatactcaaataggtggtaggagyagagacaattcaatacagacagaagtcttagatgagagcagtgagccagg

SEQ ID NO: 2143 - DNA, 101 bp, Homo sapiens
ggcagctcacggggccttccatttccagccaggcctcatctggggtagggscaagaggaaagtacagagtgcccgtgggggagaagtcccaccaggatgcc

SEQ ID NO: 2144 - DNA, 101 bp, Homo sapiens
ttcctccttagggccctgggaagagtattgcttaacgcaggatgtgctggrtgttttgtttcgggcttttatttatggcttggtgtctttcttgtttcatg

SEQ ID NO: 2145 - DNA, 101 bp, Homo sapiens
ccagagcttacaaggagctgcaagggtttgccgagggctgcccagctctgyttctggtttcctggacaatttctctgtcagatacggcccattgtaaaccc

SEQ ID NO: 2146 - DNA, 101 bp, Homo sapiens
ttccccagcctccccactgctccctcctctgttccccatgtggaggtcggrggggctgggactggggagggggcagccacctccatccaaggctcttccta

SEQ ID NO: 2147 - DNA, 101 bp, Homo sapiens
tcaggtccccatagagagggaaagagaagaccagatgtgcatagaagccartctctgtcacatacaccgcaggtggtcaccgagttattttccaaaagctg

SEQ ID NO: 2148 - DNA, 101 bp, Homo sapiens
ctttttgccaacacctcagccctgtttgctatttcatgtctgcatggtacragacaccccttcacggcatacactgccatggtatgtacatatgcatccac

SEQ ID NO: 2149 - DNA, 101 bp, Homo sapiens
agttaattggaattggttgtctccttatgggaactggaagtattttgacakctttaccacatttcttcatgggatagtaagtgttaaacagctctgagcca

SEQ ID NO: 2150 - DNA, 101 bp, Homo sapiens
cagccaaggaggctgctgtccccccacagagcagctcggactcagctcccrgagcaacccagctgcggaggcaacggcagtgctgctcctccagcgaagga

SEQ ID NO: 2151 - DNA, 101 bp, Homo sapiens
gccttcccttttgagctattgcacacgcctgaaaagtgggtgaggttcaartacccaaagctcatctcctattcctacatggttcgtgggggccactttgc

SEQ ID NO: 2152 - DNA, 101 bp, Homo sapiens
tacttgtttattgtcttgggttttacccactaatagaatccaaaggaggamatcaagaagatcattagatttctagagaagaacctgaatgatgagatctt

SEQ ID NO: 2153 - DNA, 101 bp, Homo sapiens
ttgctaaactaatgcataagacctatgaattcaaatatctttattagaccyggggctaaccaggtgaagatctgagcccagaaatgacccttcctccacca

SEQ ID NO: 2154 - DNA, 101 bp, Homo sapiens
acctccttgactcaattgatcctcccatctcagcctcccaagtagctaggrctacagacatgtgcaaccatgtttggctaatttttttaatgtttttttgt

SEQ ID NO: 2155 - DNA, 101 bp, Homo sapiens
gtcacatctttttcatacagtatccagaatctatgtagaagataaacacamaatcttatattgtgaggtacctaaggctggctgttccaattggaaaagaa

SEQ ID NO: 2156 - DNA, 101 bp, Homo sapiens
tcagtcttagcaggtgttggggtgatggtgcttgtaatcccaattaatgckatactgtccaccaagagtaagaccattcaggtaaagaaaaagtcacccag

SEQ ID NO: 2157 - DNA, 101 bp, Homo sapiens
cagtgtaaatgagtaaagagcctgcaggggagaaactgccactagtggagmccatgcgagtgggcagccgattgcttggctctgggggtgggtgccagagg

SEQ ID NO: 2158 - DNA, 101 bp, Homo sapiens
gatgcatcactcacaggagggttagcacatggaaagaacattccaaggcaraagagtcccagcagcggtcccccaaccatgccaaagatgctgattgctgc

SEQ ID NO: 2159 - DNA, 101 bp, Homo sapiens
actattaaccaaagtcagtgtgttgttcagaccttaccagtttttctgccmctgccccctttctgcttcggggatctggtccaggatcccacattcattta

SEQ ID NO: 2160 - DNA, 101 bp, Homo sapiens
cagagctgatctcctccacctttctccaatgacagaagttccaggactggktttccagtacatctttaaacaaggccccagagactctatgtctgcccgtc

SEQ ID NO: 2161 - DNA, 101 bp, Homo sapiens
ggcttcataaaggaaggccaggacatagggcaggttgggctggtcacccayacaaggcagacggtccctccccacgacctgatccaattctgcctgcactc

SEQ ID NO: 2162 - DNA, 101 bp, Homo sapiens
gcctgttgtggggtgggggaaggggggagggatagcattaggagattcacytaatgttaaatgatgagttaatgggtgcagcacaccaacatggcacatgt

SEQ ID NO: 2163 - DNA, 101 bp, Homo sapiens
tgcgaggtgctggggcagcgcatccccgcaggcgctgtgctagagatggcygtgggtgccctgcaccatgaccctgagcactggccaagcccggagacctt

SEQ ID NO: 2164 - DNA, 101 bp, Homo sapiens
tatcaggaactggccttcagccgccctcaacagtacaccagcatcgtggcrgagctcctgttgaatgcggaactgtcgccagatgccatcaaggccaactc

SEQ ID NO: 2165 - DNA, 101 bp, Homo sapiens
gttcctcccgatggtggatgcagtggccagggacttctcccaggccctgargaagaaggtgctgcagaacgcccgggggagcctgaccctggacgtccagc

SEQ ID NO: 2166 - DNA, 101 bp, Homo sapiens
cttgctgatgacgctctttgagctggctcggaaccccgacgtgcagcagaycctgcgccaggagagcctggccgccgcagccagcatcagtgaacatcccc

SEQ ID NO: 2167 - DNA, 101 bp, Homo sapiens
tccctgcaatgcagtgtaaatgagtaaagagcctgcaggggagaaactgcmactagtggagaccatgcgagtgggcagccgattgcttggctctgggggtg

SEQ ID NO: 2168 - DNA, 101 bp, Homo sapiens
cattaaatcttacataaaggaacactggtacaatactattaaccaaagtcmgtgtgttgttcagaccttaccagtttttctgccactgccccctttctgct

SEQ ID NO: 2169 - DNA, 101 bp, Homo sapiens
cttggatttggccttggcttggaggaagtcatcaacaccctggctagggaragtgcggcgccgctcctggatgacggcatctgtgaagtcgtgcaccaggc

SEQ ID NO: 2170 - DNA, 101 bp, Homo sapiens
atccacaacctgctcatgggtgacaccaaggagcagcgcatcctgaaccaygtgctgcagcatgcggagcccgggaacgcacagagcgtgctggaggccat

SEQ ID NO: 2171 - DNA, 101 bp, Homo sapiens
tgtcttcactgctgagctctacccaaccctggtcaggaacatggcggtggrggtcacatccacggcctccagagtgggcagcatcattgccccctactttg

SEQ ID NO: 2172 - DNA, 101 bp, Homo sapiens
agaccgaggaaaatgccagatagtgatgagtggtgttcgcaggtgtgtgcyggagtcccctcggtggctgttatcacaaaaaagaaacactgaagcaataa

SEQ ID NO: 2173 - DNA, 101 bp, Homo sapiens
aaagggctggccatcgccctggtggcacagtatggcatcatgcccctcacrgcctttgtgctgggcaaggtcttccggctgaagaacattgaggcactggc

SEQ ID NO: 2174 - DNA, 101 bp, Homo sapiens
ctcaagacctcaggtccccaaaggcctgaagaatccaccagggccatgggrctggcctctgattgggcacatgctgaccctgggaaagaacccgcacctgg

SEQ ID NO: 2175 - DNA, 101 bp, Homo sapiens
ctgagcctgtcttggctgggcctcaggccggtggcagcatccccgtggctkctcctgctggtggtcggggcctcctggctcctggcccgcatcctggcctg

SEQ ID NO: 2176 - DNA, 101 bp, Homo sapiens
taccaccttgcaaagcacccggaataccaggagcgctgtcggcaggaggtrcaagagcttctgaaggaccgtgagcctaaagagattgaatggtgagtgca

SEQ ID NO: 2177 - DNA, 101 bp, Homo sapiens
gaatattataaaacagcattctcaaactttttggcctcaagatccctttarattctttttttgtttgtttgtttgtttttgttttttgagacggagtctct

SEQ ID NO: 2178 - DNA, 101 bp, Homo sapiens
taattctgctttagatgtgtatacagaaaatgaaagaaactagggtccatrtgagggaaaacccaatgtcaagtggcagctcagccaccactcagtgcttc

SEQ ID NO: 2179 - DNA, 101 bp, Homo sapiens
agccaggcctcatctggggtagggccaagaggaaagtacagagtgcccgtsggggagaagtcccaccaggatgccccccctcccctgagaagcccgccttc

SEQ ID NO: 2180 - DNA, 101 bp, Homo sapiens
gcctccctttcatgtcatggaagatgcaagacagaacaggctcccaggccrttctaagcacctgaagatggtgctgacacaggtgaagtgtaaaccagcag

SEQ ID NO: 2181 - DNA, 101 bp, Homo sapiens
gccatccttggtaggaagctttattagaagccaaaataaagaagactatgmtggcctaaaagaagaatttcgtaaagaatttaccaagctagaggaggtaa

SEQ ID NO: 2182 - DNA, 100 bp, Homo sapiens
ggaattagtgagacatcagggagtaagtgacactttgaactcctcaaggrcagagaactgtctttcatttttgaaccctcggtgtacacagaggcgggtc

SEQ ID NO: 2183 - DNA, 101 bp, Homo sapiens
cctgtgtgtctgtctggttacagggtgatctctgcagttgtactgagtgcracagctcttggaagagccttctcttacaccccaagttatgcaaaagctaa

SEQ ID NO: 2184 - DNA, 100 bp, Homo sapiens
aaggayggcctcatcarcaaggacctgaccagcagagtgatgattttttcwgtgggcaaaaggcggtgcattggcgaagaactttctaagatgcagcttt

SEQ ID NO: 2185 - DNA, 101 bp, Homo sapiens
ttgagaccctgctgtcccagaaccagggaggcaagaccttcattgtgggakaccaggtgagcatctggccccatgctgttccttcctcgccaccctctgct

SEQ ID NO: 2186 - DNA, 101 bp, Homo sapiens
tttcgttttgttttccttgcttaggggatcatggacattgaagcatatctkgaaagaattggctataagaagtctaggaacaaattggacttggaaacatt

SEQ ID NO: 2187 - DNA, 101 bp, Homo sapiens
agtaaaacaatcttgtctatttgtcatccagctcaccagttatcaactgaygacctatcatgtatcttctgtacccttaccttattttgaagaaaatccta

SEQ ID NO: 2188 - DNA, 101 bp, Homo sapiens
gtcgatgctgggtctggaagctcctcccagatgtggcagcctctagaattwatttctgggaaggatcagcctcaggtgccttgcattttctgcttgacaga

SEQ ID NO: 2189 - DNA, 101 bp, Homo sapiens
ccctccctctccaggcaccacctgggtgagccagattctggacatgatctwccagggcggtgacctggaaaagtgtcaccgagctcccatcttcatgcggg

SEQ ID NO: 2190 - DNA, 100 bp, Homo sapiens
ggccgctaaacccgctgtccatccagcagaccacgctcctgctactcctstcggtgctggccactgtgcatgtgggccagcggctgctgagrcaacggag

SEQ ID NO: 2191 - DNA, 101 bp, Homo sapiens
ggcctcgggaacaaggcggggttgcgacccagagagtagaggaacacgcgyaccaatgtctgcggacggtgcagagcggggatcagggaatgactggggag

SEQ ID NO: 2192 - DNA, 101 bp, Homo sapiens
tcaggcctcgggaacaaggcggggttgcgacccagagagtagaggaacacscgcaccaatgtctgcggacggtgcagagcggggatcagggaatgactggg

SEQ ID NO: 2193 - DNA, 101 bp, Homo sapiens
tgggggttatagcgctcaggcctcgggaacaaggcggggttgcgacccagmgagtagaggaacacgcgcaccaatgtctgcggacggtgcagagcggggat

SEQ ID NO: 2194 - DNA, 101 bp, Homo sapiens
tggagataaagacagtctggctgggtacactctcaaactgggtgcttcctmtccctgcacgggagcactggggagtggccagttcaggaggggtcaactct

SEQ ID NO: 2195 - DNA, 101 bp, Homo sapiens
caactctctctgctgggctaggagcagatgaggcccaaggcaggttcacgyaggaaactgcagcctccctgtgcccaccccaggtcgtggcacatgacatg

SEQ ID NO: 2196 - DNA, 101 bp, Homo sapiens
tgtgctcacctctcctccgtccccaaccctgcacaggcaagatcgtggacrccgtgattcaggagcaccagccctccgtgctgctggagctgggggcctac

SEQ ID NO: 2197 - DNA, 101 bp, Homo sapiens
gcacgggcactgggcactagagccgctcgggcccctaggacggtgctgccrtttgaagccatgccccagcatccaggcaacaggtggctgaggctgctgca

SEQ ID NO: 2198 - DNA, 101 bp, Homo sapiens
gggacatggtcccatccagcacggcctcgtgcttggccccacaggtacgayttgggaggagcaggcatggtgtgtgtgatgctgccggaggacgtggagaa

SEQ ID NO: 2199 - DNA, 101 bp, Homo sapiens
aggaactggccttcagccgccctcaacagtacaccagcatcgtggcggagstcctgttgaatgcggaactgtcgccagatgccatcaaggccaactctatg

SEQ ID NO: 2200 - DNA, 101 bp, Homo sapiens
agggtttgccaggctaagcagcaatgccagggcacagctggggaagatctkgctgaccttgtccccagccccacctggccctttctccagcaagcactgtc

SEQ ID NO: 2201 - DNA, 101 bp, Homo sapiens
gcctgacccctaggcagctcgagcatgccctgagctctctgaaagttgtcrccctggaatagggtcctgcagggtagaataaaaaggcccctgtggtcact

SEQ ID NO: 2202 - DNA, 101 bp, Homo sapiens
catgccccaggcctcatctttcatggaccaggccttgttccaggagtgggygttgggtcctctgcttcctgtgctgtcccctggggaaggtcccgaggatg

SEQ ID NO: 2203 - DNA, 101 bp, Homo sapiens
tcggtctgatgcagccggaacacgacgtgcccgtccgctaccgcatccgcycatgacacagggagcagatggatccacgtgctcgcctctgcccagcctgc

SEQ ID NO: 2204 - DNA, 101 bp, Homo sapiens
agaagccatgtataccaacctccatgcagtgctgttgggcgatgctacagmagcaggcagtggctggcacgagatgggtctcctcgacttctcctacagct

SEQ ID NO: 2205 - DNA, 101 bp, Homo sapiens
tacggaattgaggcgctgccacgcacccatgaaagccaggcccaggaccgygtccactcagctgatgtcttccacacctttcgccagctcgaccggctgct

SEQ ID NO: 2206 - DNA, 101 bp, Homo sapiens
ggggacaaggaccacatgtgcagtgtcaaaagtcgcctgtggaagctgctrtccccagccaggctggccaggcgggcccaccggagcaaatggctggagag

SEQ ID NO: 2207 - DNA, 101 bp, Homo sapiens
accttcttcctatttcaggtatttaaatacaaccgattcctgaaccctgayggatcagagaagaaagacttttacaaggatgggaaacggctgaagaatta

SEQ ID NO: 2208 - DNA, 101 bp, Homo sapiens
gtcacgacccctccatcagatggcccctgagttctgcagcctcgaggaagkcctgccctatctggacatggtgattgcagagacgctgaggatgtacccgc

SEQ ID NO: 2209 - DNA, 101 bp, Homo sapiens
ccctcagattcacacgggaggcagctcaggactgcgaggtgctggggcagygcatccccgcaggcgctgtgctagagatggccgtgggtgccctgcaccat

SEQ ID NO: 2210 - DNA, 101 bp, Homo sapiens
cccggattttgcccaataagaaccgagacgaactgaatggcttttttaacraactcattaggaatgtgattgccttgcgggaccagcaagctgccgaagag

SEQ ID NO: 2211 - DNA, 101 bp, Homo sapiens
tcgtcagagacgttttctcctctactgggtgcaagccgaacccttcccggmaacaccagcccagccctatggccaggcctttgactgtggatgagattgtg

SEQ ID NO: 2212 - DNA, 101 bp, Homo sapiens
gaaagcttccagccccaccgctggctgagaaacagccagcctgctacccccaggatccagcacccatttggctctgtgccctttggctatggggtccgggc

SEQ ID NO: 2213 - DNA, 100 bp, Homo sapiens
gaaagcttccagccccaccgctggctgagaaacagccagcctgctaccccaggatccagcacccatttggctctgtgccctttggctatggggtccgggc

SEQ ID NO: 2214 - DNA, 101 bp, Homo sapiens
tgcacttccggttcctgccagaccacactgagccccgcaggaagctggaaytgatcatgcgcgccgagggcgggctttggctgcgggtggagcccctgaat

SEQ ID NO: 2215 - DNA, 101 bp, Homo sapiens
tgcagccctggatgggatctgcagcaatggctgcttcatctgtttctgtastactttcttctctcttccttaaactgtaagtatgatagcttgctcacatt

SEQ ID NO: 2216 - DNA, 101 bp, Homo sapiens
caggtgaagtgtaaaccagcagtgaaccctgtagaatgccttggatcccarcactcagtccgcttccctgagttggatatgatgttagcaaataccaccat

SEQ ID NO: 2217 - DNA, 101 bp, Homo sapiens
gtgttgaggctcttgtgcagctcgactggagtgaccatcatcctcccaaaygtgctcatcatctgagagaaatgcaaatgcctttttattctgaattctcc

SEQ ID NO: 2218 - DNA, 101 bp, Homo sapiens
cagccatatcgtaaagccctgggaataggtggccgacatctgggtcgagtycttcaagccctcctctgtaggagtgatctgaaagcaagtcaagggctgtc

SEQ ID NO: 2219 - DNA, 101 bp, Homo sapiens
ccggcaacaccagcccagccctatggccaggcctttgactgtggatgagaytgtgggccaggccttcatcttcctcatcgctggctatgaaatcatcacca

SEQ ID NO: 2220 - DNA, 101 bp, Homo sapiens
atggggccatattttttctgcagcttgaagaagttgttatgcatatggccrtgtctggggaggaatggcaggctgcccaccaggggcagggacaggaggct

SEQ ID NO: 2221 - DNA, 101 bp, Homo sapiens
ttgcctgcagagcgtttcttgaatccagcggggacccagctcatctcaccrtcagtaagctatttgcccttcggagcaggacctcgctcctgtataggtga

SEQ ID NO: 2222 - DNA, 101 bp, Homo sapiens
tcattaactcctggtagagaagaaaaccccagcagtgtgcttgctcaggaraggggagatgtgatggacttctataaaaccctaagaggaggagctactgt

SEQ ID NO: 2223 - DNA, 101 bp, Homo sapiens
tggctgtcgcttctcaatcagactccaagcagcgaagacttttggttgatkttccaaaaggctcagtaagcaatgcgcagcagccagatctgtccaaagca

SEQ ID NO: 2224 - DNA, 101 bp, Homo sapiens
gccataagaaacatccaggagtactgcagtagggtcatttggtcatccagrtgtaagttcctgaaacctgaattaagagaaataaaggtatgaggcaacac

SEQ ID NO: 2225 - DNA, 101 bp, Homo sapiens
tcttattaaggcagtcacttttgatgaaacagaagttttttgatatttccrtttgaatattttggtatctgattggtgatgatttcagctaacatctcggg

SEQ ID NO: 2226 - DNA, 101 bp, Homo sapiens
gacactaaacccaaaattaaggataatggagatctggttttgtcaagcccyagtaatgtaacactgccccaagtgaaaacagaaaaagaagatttcatcga

SEQ ID NO: 2227 - DNA, 101 bp, Homo sapiens
tcatagccctcatcaccattgaccgcgtgggccgcatctaccccatggccrtgtcaaatttgttggcgggggcagcctgcctcgtcatgatttttatctca

SEQ ID NO: 2228 - DNA, 101 bp, Homo sapiens
acagggtggagggagcattggaatggcactcagggcaaaggcagaggtgtrcatggcagtgccctggctgtccctgcaaagggcacaggcactgggcacga

SEQ ID NO: 2229 - DNA, 101 bp, Homo sapiens
ctgtaggaatctgtcacacagatgaccacgtggttagtggcaacctggtgwccccccttcctgtgattttaggccatgaggcagccggcatcgtggagagt

SEQ ID NO: 2230 - DNA, 101 bp, Homo sapiens
acctccttctcctctatctcctggctgtctggcttgatccagaagacacaygagggcccccttcctctgcagaagctcctggtaggaacccatctctgcga

SEQ ID NO: 2231 - DNA, 101 bp, Homo sapiens
cagcgccctggctgtccctgcaaagggcacgggcactgggcactagagccrctcgggcccctaggacggtgctgccgtttgaagccatgccccagcatcca

SEQ ID NO: 2232 - DNA, 101 bp, Homo sapiens
aaataaaaatggcaaaagaatctcatgttttaataaagtttacgtatttgygttgggatgcattcagagctctcctgggctgcatgcagtcatgggccatg

SEQ ID NO: 2233 - DNA, 101 bp, Homo sapiens
ttccagaaacgcatctcaaagcaagggagaaaattgaagatggggtatttygtggggaacaagctatgccttcctgtcacttcttacagaataaaatgggg

SEQ ID NO: 2234 - DNA, 101 bp, Homo sapiens
ataataataaactgtggtttccaagtatctcactgggatttttattctttrtaccttgcaggactagtccaagatttgaataccctgaacttatttggcaa

SEQ ID NO: 2235 - DNA, 101 bp, Homo sapiens
agtgaagaagtttctacagcctggcagcccaaggaagcctcccatggatgmgaaatctttagaagaatcaaggaagattttcaggttttaataaaccagcc

SEQ ID NO: 2236 - DNA, 101 bp, Homo sapiens
ttgtgctatgtgcatatcatatgtattatttcatttaattctcacaacaaytctgtgaaatggttacagctattatagtcatttcacagatgatgaaacta

SEQ ID NO: 2237 - DNA, 101 bp, Homo sapiens
ctattcaaaccaaccttttattccttaggcttgtgtagcctgccctcagaragaactatgatgatggacattatcaaaaggaatgaaaaaagaattgacct

SEQ ID NO: 2238 - DNA, 101 bp, Homo sapiens
tgggcctgggcgtagcgccagccgccgcggcacggcacaaggggagccgarcggttggggaaggcggcgagtgggtccgcgcagctgagagcgctagtggc

SEQ ID NO: 2239 - DNA, 101 bp, Homo sapiens
tgtcggggagtggccgggagttgggcgagtacgggctgcaggcatacactraagtgaaaactgtgagtgtgggacctgctgggggctcagggcctgttggg

SEQ ID NO: 2240 - DNA, 101 bp, Homo sapiens
ttattaccgttgttactttaactctttccaggatggcctgcctccttcgckcatttcagagaatttctgcaggggttttcttcttagcactttggggcatg

SEQ ID NO: 2241 - DNA, 101 bp, Homo sapiens
ctcaatgtctgcgcagggagagcatcagaaacctactcgtttttcaagcartagttgctctccgggtttttacaaattctgcattttccacactgaggaat

SEQ ID NO: 2242 - DNA, 101 bp, Homo sapiens
ggtggggccacttctacctcttcaatagaaaatggtgcaccaggcttccaragtatggctgctttgcatctgatgacctgggaaatagaatacaggggcag

SEQ ID NO: 2243 - DNA, 101 bp, Homo sapiens
cgctttgacccagagaacagcaaggggaggtcacctctggcttttattccyttctccgcagggcccaggtaagagcgccctgtgtctgaggcagggatggg

SEQ ID NO: 2244 - DNA, 101 bp, Homo sapiens
tttcccatttttcaggtggttttgtggtgtctgcttgtcctccgacctccyctcccatttgtgggaaaggcatttggcctggagggaggcacttgggaaga

SEQ ID NO: 2245 - DNA, 101 bp, Homo sapiens
gcacctgtgaacatttcctgtgctctgggtctggtgcttctcaagtttaayacccaggggcgagtggtcagggactgatccttgaggaactgatgtacatt

SEQ ID NO: 2246 - DNA, 101 bp, Homo sapiens
ttagcataaaatgatctctatctgatatagacatctgataatagaaaatgyggaagagagcattaacacaaaatgaataccaaataaaaatcacttaatga

SEQ ID NO: 2247 - DNA, 101 bp, Homo sapiens
caccttccatgtgtgtctggatgtttaaccttaccaagcagaagattctcrtcatatccttcagtttgagctcctttatttggcgttggttctctaaagaa

SEQ ID NO: 2248 - DNA, 101 bp, Homo sapiens
actcctgtggcctggcatgaagataattgactgtgttttgaacgcattatraggcccctgcgaggcctccgtgtggtatttagacagtcagcaggagagag

SEQ ID NO: 2249 - DNA, 101 bp, Homo sapiens
ggagcctggtgggcagcacgtgccgcgggggcaggaaggggagagcttccsggaaggggatggaacttgagccaaacctttttctcaaaaagaggggaggc

SEQ ID NO: 2250 - DNA, 101 bp, Homo sapiens
gatgaaaatccatggagataaagacagtctggctgggtacactctcaaacygggtgcttcctctccctgcacgggagcactggggagtggccagttcagga

SEQ ID NO: 2251 - DNA, 101 bp, Homo sapiens
ccagcaaggatttgaaagatgccatagaagttctgatagcagaaaaaagaygcaggatttccacagaagagaaactggaagaatgtatggactttgccact

SEQ ID NO: 2252 - DNA, 101 bp, Homo sapiens
cgtcctttgttccttcccttctaggtcagtcaccacgaacaggggcactcrgcatgctgccccagcactggagaagcagcgctgtgggggcaatctgtcac

SEQ ID NO: 2253 - DNA, 101 bp, Homo sapiens
actaacttggcttttctctggcagattgctgatctcctttgcaagtgaccrtgacacatatttgtggattggatatctctgtgcaatcctcttattcactg

SEQ ID NO: 2254 - DNA, 101 bp, Homo sapiens
ctgtaaatatttttttaacctaatatcacttaaatcgaggcagaaagatayagacattcaatgaattatattcaatgcatttaaaataccactgtaattga

SEQ ID NO: 2255 - DNA, 101 bp, Homo sapiens
ccccagcaaagcacctgatccatgacatgagctaggcctgtgaggatggcrccatgtctgtagccttggaaacacgtaacaaatttgtccccagtccagtt

SEQ ID NO: 2256 - DNA, 101 bp, Homo sapiens
ctgtgtcctcaaggcagtcccctcccatccccattcccaaagtcagaaagygaagccagatctcaagggctgatacctgaggcaaggagagctaaggggag

SEQ ID NO: 2257 - DNA, 101 bp, Homo sapiens
aaatatactgttttcatccatctgggctgctacaacaaaataccctaagcygagtggcttataaacaacagaaatgtaattctcatagttccaaagactgg

SEQ ID NO: 2258 - DNA, 101 bp, Homo sapiens
ggttgtcccccgtgatcagaaccacgtccacacccatgctctgcagcgtgygcacagccagggcagcctcctgcttgacagcgtctgcgattgcgatcatc

SEQ ID NO: 2259 - DNA, 101 bp, Homo sapiens
ctgggaaaaccctaatgaactgaaacacacttttactttaaaatttttctrtctggcgtttttgtaatcatactattaaatgactctggagtcatgttaat

SEQ ID NO: 2260 - DNA, 101 bp, Homo sapiens
ggcatcagcaactggctgggcaacatgcttcagtttctgagggagcagggkgtaccctcagctatgcaggacaagttcaacttcatgatgctctgggcctc

SEQ ID NO: 2261 - DNA, 101 bp, Homo sapiens
gccacgagctcccacatggtggctgggtgccggcaggcaagatagacagcrgtggagtagaagagctgtggcaactctagggcacaaggaggccttttaaa

SEQ ID NO: 2262 - DNA, 101 bp, Homo sapiens
aatacatatctatctatctgcacagctcataactgggagtcttatatccaraaggctttgtcacaaggtatctttatcctctcagtagttattttctttta

SEQ ID NO: 2263 - DNA, 101 bp, Homo sapiens
gccctgtactgtctgacacatgttcccaaacttactgttccctggagtagyccaccaggcccaatgacctggttgaagacatgctggccaacgtgggcatc

SEQ ID NO: 2264 - DNA, 101 bp, Homo sapiens
ggaaccccgggtccctgcttgacctgattgtctcctcctgcagaccctaargcccctgatgtgtatgacttcttcctccagtggattggtgagtgagcacc

SEQ ID NO: 2265 - DNA, 101 bp, Homo sapiens
tcactgtataaatacatattccccgctcacctggacaagtcaaccctcgcrtgcattggtctcatccagcccctaggttccattttcccaactgctgaact

SEQ ID NO: 2266 - DNA, 101 bp, Homo sapiens
gctacttcctttgatgtggttttaacagaccccgttaacctctgcgcggcrgtgctggctaagtacctgtcgattcctactgtgttttttttgaggaacat

SEQ ID NO: 2267 - DNA, 101 bp, Homo sapiens
aaacggttcagtaattacggtaaatgtatgtagattgaagtactgatacaygctacacagatgaacctcaaaatcatgctacgtgaaagaagacggtctca

SEQ ID NO: 2268 - DNA, 101 bp, Homo sapiens
aacgtaagtttaaacaaacaagacaaagtttcagaatgatactgtatgatrccatttatgtaaattgtgttacctgcaaatcactatttgtaatgttcgta

SEQ ID NO: 2269 - DNA, 101 bp, Homo sapiens
ggcaggctgcagcctcagcttccgctctgagctgtgagaggggttcctggrgtcactgcagagggagtgtgcgaatcaagcctgaccaagaggctccagaa

SEQ ID NO: 2270 - DNA, 101 bp, Homo sapiens
gacatcatttttgcagatgctttttttccttgtggtgagctgctggctgcrctacttaacataccgtttgtgtacagtctctgcttcactcctggctacac

SEQ ID NO: 2271 - DNA, 101 bp, Homo sapiens
gagactgtacacaaaccgtatgttaagtagcgcagccagcagctcaccacrgggaaaaacagcatctgcaaaaacgatgtcaaatcttgactcttgtagtt

SEQ ID NO: 2272 - DNA, 101 bp, Homo sapiens
catgggcttgtgactgaatgtcctgagccttcattttcttccctgtgaggrttaaaatgaacctcaggaaatgctggcttgtcctctttctgtcaagctgg

SEQ ID NO: 2273 - DNA, 101 bp, Homo sapiens
ggcctggagagggaggcagggacgagagcctgtggctgtcttcagcacacrggagtcattttctggcagtaatgtccagaagggctttgaccaaggtgttc

SEQ ID NO: 2274 - DNA, 101 bp, Homo sapiens
attcaggttatcatcattccctatctgattgatgaggaaactaaggctcaraaaaatccatttgctcaaggagaaacagtgtttcagttacctactgctgt

SEQ ID NO: 2275 - DNA, 101 bp, Homo sapiens
ggagcttttaaacgaatggtttccaaaacacaccatttaattagaaggagwttctccaggtcatcctcagacactttaatcttatctttgcctgtaaaaaa

SEQ ID NO: 2276 - DNA, 101 bp, Homo sapiens
attaggcaattagaggcctgtggcaggagagcattcgttcctggacatgcygtggcactgccaggagactttactccaggaatggggtcgttgtcaggagg

SEQ ID NO: 2277 - DNA, 101 bp, Homo sapiens
tggttcttgcttgggatatgtcatgttgctatagtcaaatgaagacggggyaggtgtcatctgaaggctcagctgggctgggtgtccacgctggcttaggc

SEQ ID NO: 2278 - DNA, 101 bp, Homo sapiens
tatctggaaattatattatttagaatctgccaattacctagatcccccctsaacaattgtttcaccaaggaacttcctgaaagcacatgtataagtatcat

SEQ ID NO: 2279 - DNA, 101 bp, Homo sapiens
gaccaaattgtcttaatttgaacataggcaaaattttccccaatacaacgrtgacgccctaaaaaaaagaaaaagttataagaatcagtttaaattctttc

SEQ ID NO: 2280 - DNA, 101 bp, Homo sapiens
gtagtcaaacatgtttccaaaccaggacagggctgaattcataaaagacarcagggccaggaaggcaatcagattcacagcgatgttggccaccagggaga

SEQ ID NO: 2281 - DNA, 101 bp, Homo sapiens
tctttctaaaatgaacctgtaactttccaacaaccttcaaatgcacagaartcttagttatcattctctagcattagaagtggagctgggagaggctcagg

SEQ ID NO: 2282 - DNA, 101 bp, Homo sapiens
tattcctaccccttccttgatgagaccatcatgaaaagcagaaacaatgargttaccttgtttaaaggcatcttccccccactaatggagaagccaacctt

SEQ ID NO: 2283 - DNA, 101 bp, Homo sapiens
gccggtggtcagattatcattgatggagtagatattgcttccattgggctycacgacctccgagagaagctgaccatcatcccccaggtgagctctagaac

SEQ ID NO: 2284 - DNA, 101 bp, Homo sapiens
attctagtcaaagacttggtaaaataatcagtgtctccaattgtcctgttwtaaaacaaaagactcttactaaacttatgcaaataactatattgtcataa

SEQ ID NO: 2285 - DNA, 101 bp, Homo sapiens
ctcagacgccgcacaaggtcgcagactacgttgttcagggttccggcgtarcgggcggccgcttgaggccggaggaggagcggggccaggagactgcggag

SEQ ID NO: 2286 - DNA, 101 bp, Homo sapiens
aaatccaattttaaaagcttcttcatatttttcagaaagggatcttgtggrttgttgagagaatccaagttcactccaaataatgtgccagtgattacatc

SEQ ID NO: 2287 - DNA, 101 bp, Homo sapiens
gcctctgtccagccctccacccaccacctcctaccccagccccacttacaratgcaggcagcagccagcaggcggctggcagcataaggggcgaagcagct

SEQ ID NO: 2288 - DNA, 101 bp, Homo sapiens
cagggaagccacaggacttagacccagctcaatcccacaattgggaagggktcatggagtgagtgtgcagagagtgagtgaggacataaggaaggacatgt

SEQ ID NO: 2289 - DNA, 101 bp, Homo sapiens
aagctggtctacccggaggtggaggagtccaagtttaggagggaggaaggmgtgaaactgacctatgggtgagcacagcaggaggtcctgcagacagggta

SEQ ID NO: 2290 - DNA, 101 bp, Homo sapiens
tggtgaaacgccgtctctactaaaaatacaaaaattagtcaggcatgatgrcaggcgcctgtcatcccagctactagggaggctgaggcaggagaattgct

SEQ ID NO: 2291 - DNA, 101 bp, Homo sapiens
gctgccatgtggactggtgcaagttgaggacttcttgctggtctagtcacrcatgcagtgttggggatgccttggtttttactgctctgagaattgttgag

SEQ ID NO: 2292 - DNA, 101 bp, Homo sapiens
tacctgtggaggcagggagggctttcctgggaccaggcgaaggtggcactktgtatggtgatgcaatccttcccggcagctgcagggcacaagaggccatt

SEQ ID NO: 2293 - DNA, 81 bp, Homo sapiens
aagcttggccaacatggcgaaacctcgtctctactaaaaayacaaaaattagccgggcatggtggtgggtgcctgtaatcc

SEQ ID NO: 2294 - DNA, 101 bp, Homo sapiens
ctttgccttgttcttgaggaaatcatcaataccctgagtggggagggtgcrgcgccgctcctggatgacggcatctgtgaagtcgtgcaccaggtggcagg

SEQ ID NO: 2295 - DNA, 101 bp, Homo sapiens
ttccgggaagagttgcctgcccagtccatcctgggaaatgtgacagagttrctattggcgggagtggacacggtgaggttctccctccgtgctgtgagccg

SEQ ID NO: 2296 - DNA, 101 bp, Homo sapiens
accctttcattcatcatagggataagattttttgtaggcacaagaccaagrtatacatcttcccctaatgcctatctgaccaaactggatagaaccaccat

SEQ ID NO: 2297 - DNA, 101 bp, Homo sapiens
tgtgataagttaacaagttaaatcagtttcctgcattctaggaatcttggygtccacatctgttcctcaatgtgtgacattggtggcatcatcacgccatt

SEQ ID NO: 2298 - DNA, 101 bp, Homo sapiens
acagcgctgtgccttgtgttggtcttcacagtcaccctgtccgtcttcccygccatcacagccatggtgaccagctccaccagtcctgggaagtggagtga

SEQ ID NO: 2299 - DNA, 101 bp, Homo sapiens
tgaggatgacatcagaaatagagaccaacattgtggctgttgagcgaatarctgagtacacaaaagtggaaaatgaggtaaggaggaactggaaaaatcca

SEQ ID NO: 2300 - DNA, 101 bp, Homo sapiens
caaaacgagttcgcccactgcacagtgatcaccatcgcccacaggctgcayaccatcatggacagtgacaagtgagtgtagggggacagggcttgacacgg

SEQ ID NO: 2301 - DNA, 101 bp, Homo sapiens
tcttccttgtttcagggtaatggtcctagacaacgggaagattatagagtrcggcagccctgaagaactgctacaaatccctggacccttttactttatgg

SEQ ID NO: 2302 - DNA, 101 bp, Homo sapiens
tgggcgctccctgatttgtctttcagctggaaggtctgggacatggagaaygacccctcgagacgaagagagtccatctctctcacacctgtggccaaggg

SEQ ID NO: 2303 - DNA, 101 bp, Homo sapiens
gctttctgttgggtggggtggtaggtgtcctggagggccgtgtcttggggwcttggactgcagtttgtacttggactcctcgtcatcagaacagaaccagg

SEQ ID NO: 2304 - DNA, 101 bp, Homo sapiens
cggtgccagccataccgttgtgccctcagctcatctgctcctacatcctgmggcctgtagccttcttgatgggtgtggcgtgggaggactgcccagtggta

SEQ ID NO: 2305 - DNA, 101 bp, Homo sapiens
gccagatccagtcagaagaatttgaactaaatgatgaaaaggctgccactrgaatggccccaaatggctggaaatctcgcctatttaggcattctactcag

SEQ ID NO: 2306 - DNA, 101 bp, Homo sapiens
gcaattaactcggattctcttaatctttggaaacacaggaccattgtgtcrctctccattgtctacacaattggacaagcagtcacctcagtaagctccat

SEQ ID NO: 2307 - DNA, 101 bp, Homo sapiens
acttttaacgagctcatcaccatcacaatgagtgggaaagtttatgcaaayatcagcagctacaatgccagcacataccagttttttccttctggcatgta

SEQ ID NO: 2308 - DNA, 101 bp, Homo sapiens
actgacaaggataaacatttcttctcctggatcaccagtcactgctgtaamtgacgacttcaagcagggccaacgccacacgcttctagtgtgggccccca

SEQ ID NO: 2309 - DNA, 101 bp, Homo sapiens
gccctctctttgctcctttgcaggttgctcatcaagttcgtgaatgacacraaggccccagactggcagggctacttctacaccgtgctgctgtttgtcac

SEQ ID NO: 2310 - DNA, 101 bp, Homo sapiens
ttcagcgtggctgagccaggtgtgttgtgtcgtttcagcatcaccttctcyatccccgaaggtgctttggtggccgtggtgggccaggtgggctgcggaaa

SEQ ID NO: 2311 - DNA, 101 bp, Homo sapiens
atgattcaccttctcctgcaggtgaccattgatggcaggaactacattgtygatgctgggtttggacgctcataccagatgtggcagcctctggagttaat

SEQ ID NO: 2312 - DNA, 101 bp, Homo sapiens
cgcccaagctcagtgcccctccctgagccatgcctcccccaacagctataygggcagctccccaagttccaggacggagacctcaccctgtaccagtccaa

SEQ ID NO: 2313 - DNA, 101 bp, Homo sapiens
aagctgcctccgggacccaccccattgcccttcattggaaactacctgcarctgaacacagagcagatgtacaactccctcatgaaggtgtcccaaggcag

SEQ ID NO: 2314 - DNA, 101 bp, Homo sapiens
agggctgcttgaggtcaagttgacactgctccacgtgctgcacaagttccrgttccaagcctgccctgagacccaggtgaggcccccctgctcagaggcag

SEQ ID NO: 2315 - DNA, 101 bp, Homo sapiens
gcaatcctatttgtttgagtcaagcagaactgaatgacctgccagtattargtgggtatacttgttatgttgagtttcattttctatgtcctactacttta

SEQ ID NO: 2316 - DNA, 101 bp, Homo sapiens
agagaagctaaaaggaaagaaaataaatctatcaaaattaccctaaacatyctaagctcatctatttctttttaatttctgcaaatgtaattgatttattt

SEQ ID NO: 2317 - DNA, 101 bp, Homo sapiens
tggtgaagtaccctgggcataggcctggctcggtgtgctctgcagggaackcagtggtcctcaagccctcggagctgagtgagaacatggcgagcctgctg

SEQ ID NO: 2318 - DNA, 101 bp, Homo sapiens
tcccctttgtgaagggcgcagcaactatacccttgatggatggagatttaygcaatgtgttttactgggtagagtgacagaccttggctgtccctggaatt

SEQ ID NO: 2319 - DNA, 101 bp, Homo sapiens
agcacaactctgagatatgggctcctgattctcatgaaataccctgagatygaaggtaggcaagtgactgaagggacaccgtgcgtgcggctgcatctccc

SEQ ID NO: 2320 - DNA, 101 bp, Homo sapiens
ataaaatccaagcgcgctgttgattgtgttttccttgttttcagccccccsactccagcccgcagcacatttccgctgtccgtcagtaattgtgtcctctc

SEQ ID NO: 2321 - DNA, 101 bp, Homo sapiens
ggagttggcctgtcagtcatcatgggctgtaagtcagctggtgcatctagratcattgggattgacctcaacaaagacaaatttgagaaggccatggctgt

SEQ ID NO: 2322 - DNA, 101 bp, Homo sapiens
ttggctgcctttcatgccactggtgctcctttgtggctatggaccagtggsgggtgtatttcaatcctgtgcttgtttcttttttgtcagagtttctttgg

SEQ ID NO: 2323 - DNA, 101 bp, Homo sapiens
ttatcccctgagcatcttcttcatcgtggtcaatgagttttgcgaaagatwttcctactatggaatgcgaggtaactgtattggccgtttctcacccttca

SEQ ID NO: 2324 - DNA, 101 bp, Homo sapiens
cattactgttttctctctcaggtaaaggatggtcttaaccagaagccagaraaaggggaaaatggaatcaggtatgtatatttctttaaaatttaagtttt

SEQ ID NO: 2325 - DNA, 101 bp, Homo sapiens
ctggttgaattcccagctgccttcatgatcatcctcaccatcgaccgcatyggacgccgttacccttgggctgcatcaaatatggttgcaggggcagcctg

SEQ ID NO: 2326 - DNA, 101 bp, Homo sapiens
tgttggacctattccagtcatcagtgaatgtaggattctttattggctctrtgagtatcggctacatagcagacaggtaggttgaatcacctgtggtggaa

SEQ ID NO: 2327 - DNA, 101 bp, Homo sapiens
cgcttaatccaaggactggtcagcaaagcaggctggttaataggctacatyctgagtaagaatgtttgtgcttgcaactgtgagaacaaagcaacctcgct

SEQ ID NO: 2328 - DNA, 101 bp, Homo sapiens
tgacggctccctgcgggctgtaggaggaaggccagctccctaggagtgacytgagccccgcagagatcaggagcagctggagcgaggcggcgccgaagccc

SEQ ID NO: 2329 - DNA, 101 bp, Homo sapiens
ccctgcgggctgtaggaggaaggccagctccctaggagtgacttgagcccsgcagagatcaggagcagctggagcgaggcggcgccgaagcccttctccag

SEQ ID NO: 2330 - DNA, 101 bp, Homo sapiens
gcagtttgtacttggactcctcgtcatcagaacagaaccaggattcattgygttcgagtggctgggcgagcagatccgggtaggtatgtggggtctggctg

SEQ ID NO: 2331 - DNA, 101 bp, Homo sapiens
gaaggtctgggacatggagaacgacccctcgagacgaagagagtccatctstctcacacctgtggccaagggtctggagaacatgggggctgatttcttgg

SEQ ID NO: 2332 - DNA, 101 bp, Homo sapiens
cagtaatgatcattcttgatcccaacaacagagatgctcagaacctcatasaagcagccagcactggggccgccatctccgtgaaggtggtcgccaacatc

SEQ ID NO: 2333 - DNA, 101 bp, Homo sapiens
tacatgcccaggggggctgaagttgactgcatgtccctcttgaacacgacyctcagcagcagtagctttgagatttaccagtgctgccgtgaggccttcca

SEQ ID NO: 2334 - DNA, 101 bp, Homo sapiens
gcgatctttgctttctttttagcgtcaatccagagttcagcccagaggccstggacaactgctgtcggttttacaaccacacgatctgtgcacagtgagga

SEQ ID NO: 2335 - DNA, 101 bp, Homo sapiens
acaaccacacgatctgtgcacagtgaggacagaacatgcttgtgcttctgygcttctgagggctgttctcccccgggaaccatctgtccccaccttccctt

SEQ ID NO: 2336 - DNA, 101 bp, Homo sapiens
tgtgctgttatcattttgaccatcatctgttacctgggcctgccccgcctrgtgagtaaatggagggagctggggtttggggtataggggtctggggttcc

SEQ ID NO: 2337 - DNA, 101 bp, Homo sapiens
ggagctatcagaaagtgccttcggctactttatcacagcctgtgctgttaycattttgaccatcatctgttacctgggcctgccccgcctggtgagtaaat

SEQ ID NO: 2338 - DNA, 101 bp, Homo sapiens
tgtgacaaaggatggacagaaggactgcctgcctccctccctgtctgcctmctgccccttccttctgccaggggtgatcctgagtggtctggcggtttttt

SEQ ID NO: 2339 - DNA, 101 bp, Homo sapiens
aggatcctgagcaccaaccacacgggtcccgaggatgccttcaacttcaamaattgggtgacgctgctgtcccagctgcccctgctgctcttcaccctcct

SEQ ID NO: 2340 - DNA, 101 bp, Homo sapiens
agccggcgggaccaggtgcctctcttctgcagctgaagttcctccgcaggtggcgtggacgccgagacctctgccctggggtactttatcacgccctgtgt

SEQ ID NO: 2341 - DNA, 100 bp, Homo sapiens
agccggcgggaccaggtgcctctcttctgcagctgaagttcctccgcaggggcgtggacgccgagacctctgccctggggtactttatcacgccctgtgt

SEQ ID NO: 2342 - DNA, 101 bp, Homo sapiens
ccggcgggaccaggtgcctctcttctgcagctgaagttcctccgcaggtggcgtggacgccgagacctctgccctggggtactttatcacgccctgtgtgg

SEQ ID NO: 2343 - DNA, 100 bp, Homo sapiens
ccggcgggaccaggtgcctctcttctgcagctgaagttcctccgcaggtgcgtggacgccgagacctctgccctggggtactttatcacgccctgtgtgg

SEQ ID NO: 2344 - DNA, 101 bp, Homo sapiens
tacttcatcaccttcatgctgctctttgccgtttctaatggctacctggtrtccctcaccatgtgcctggcgcccaggtccggggcaatggggtggggtgg

SEQ ID NO: 2345 - DNA, 101 bp, Homo sapiens
tgtaactgctgacatcctccctattttgcatctcaggtcacccgatgaccsgtgcctttatcacccatgctggttcccatggtgtttatgaaagcatatgc

SEQ ID NO: 2346 - DNA, 98 bp, Homo sapiens
cctggttccaccccaccccacccctctgccaggtggggcaggggtttcgggctgrtggagcatgtgctgggacaggacagcatcctcaatcaatccaa

SEQ ID NO: 2347 - DNA, 101 bp, Homo sapiens
gcaacatagaaaatgcctgctacccgctgggcatctgtgctgaacggaccrctatccagaaggccgtctcagaagggtacaaggatttcagggcaattgct

SEQ ID NO: 2348 - DNA, 120 bp, Homo sapiens
ctgaggcaagaggattgtttgagctcaggaggtcgaggctgcagtgagccatgattgtggcacatgaaccccaacctgggtgacagagcaagactctgtatctaaaaaaaaaaaaaaaag

SEQ ID NO: 2349 - DNA, 119 bp, Homo sapiens
ctgaggcaagaggattgtttgagctcaggaggtcgaggctgcagtgagccatgattgtggcacagaaccccaacctgggtgacagagcaagactctgtatctaaaaaaaaaaaaaaaag

SEQ ID NO: 2350 - DNA, 101 bp, Homo sapiens
tggggacagaaagacggggagcctgggctaggtgtaggggtcctgagttcygggctttgctacccagctcttgacttctgtttcccgattttaaatgagca

SEQ ID NO: 2351 - DNA, 101 bp, Homo sapiens
cccaagaaatgctgtgtcttcgtaaaccagtggcaggtcaaccatgacccrtgagtacatacccctcacgaaaaaatgtgtgcaggttcagcagtcaggaa

SEQ ID NO: 2352 - DNA, 101 bp, Homo sapiens
aggcatcgaggagcgcatccaggaggagscgggcttcctcatcgacgcccwccggggcactggcggtgagcaggggaccccgagtgcgggggcaggagaag

SEQ ID NO: 2353 - DNA, 101 bp, Homo sapiens
cacctccccaggcgtggtattcagcaacggggagcgcgccaagcagctccrgcgcttctccatcgccaccctgmgggacttcggggtgggcaagcgaggca

SEQ ID NO: 2354 - DNA, 101 bp, Homo sapiens
taaggacattgacgtgtcccccaaacacgtgggctttgccacgatcccackaaactacaccatgagcttcctgccccgctgagcgagggctgtgccggtgc

SEQ ID NO: 2355 - DNA, 101 bp, Homo sapiens
ggccatacgggaggcccttgtggacaaggctgaggccttctctggccgggraaaaatcgccatggtcgacccattcttccggggatatggtgagagcctca

SEQ ID NO: 2356 - DNA, 101 bp, Homo sapiens
gcctcccaccagggccccgccctctgccccttttgggaaaccttctgcagrtggatagaagaggcctactcaaatcctttctgagggtaagacacagacga

SEQ ID NO: 2357 - DNA, 101 bp, Homo sapiens
aatatcttttgatcttgtgatcctccctcaggacacagaagtatttctcawcctgagcactgctctccatgacccacactactttgaaaaaccagacgcct

SEQ ID NO: 2358 - DNA, 101 bp, Homo sapiens
cagaaagaaacaaaggcaaagagaaattgaggcagagaaaattagagagasagacagacaaagcttaggaaaaggtctgcagaggaatgagagaagacagg

SEQ ID NO: 2359 - DNA, 101 bp, Homo sapiens
acctgctgcttcttcctaggggccctcatggaccccaccttcctcttccaktccattaccgccaacatcatctgctccatcgtctttggaaaacgattcca

SEQ ID NO: 2360 - DNA, 101 bp, Homo sapiens
aagctggacccacaatttctttcccagacaccagagggcaggtactatccycaacttgagaaaaacaacgagagatactgattatttgagcacttaatata

SEQ ID NO: 2361 - DNA, 101 bp, Homo sapiens
ggatttgcttctgtcccgcccttctatcagctgtgcttcattcctgtctgmagaagcacagatggtctggctgctcctgtgctgtccctgcagctctcttt

SEQ ID NO: 2362 - DNA, 100 bp, Homo sapiens
aatggatccttttgtggtccttgtgctctgtctctcatgtttgcttctccyttcaatctggagacagagctctgggagaggaaaactccctcctggccct

SEQ ID NO: 2363 - DNA, 101 bp, Homo sapiens
aacttgatggaaaaattgaatgaaaacatcaggattgtaagcaccccctgratccaggtaaggccaagttttttgcttcctgagaaaccacttacagtctt

SEQ ID NO: 2364 - DNA, 101 bp, Homo sapiens
agttacacatgaggagtaacttctccctatgtttgttattttcaggaaaayggatttgtgtgggagagggcctggcccgcatggagctgtttttattcctg

SEQ ID NO: 2365 - DNA, 101 bp, Homo sapiens
caacaaccctcgggactttattgattgcttcctgatcaaaatggagaaggwaaaatgttaacaaaagcttagttatgtgactgcttgcgtatttgtgattc

SEQ ID NO: 2366 - DNA, 101 bp, Homo sapiens
cctcatgacgctgcggaattttgggatggggaagaggagcattgaggaccrtgttcaagaggaagcccgctgccttgtggaggagttgagaaaaaccaagg

SEQ ID NO: 2367 - DNA, 101 bp, Homo sapiens
ccagggcacaaccataatggcattactgacttccgtgctacatgatgacaragaatttcctaatccaaatatctttgaccctggccactttctagataaga

SEQ ID NO: 2368 - DNA, 101 bp, Homo sapiens
aggaccgtgttcaagaggaagctcactgccttgtggaggagttgagaaaaaccaagggtgggtgactctactctgcgtcattgaccttaacagttacctgt

SEQ ID NO: 2369 - DNA, 100 bp, Homo sapiens
aggaccgtgttcaagaggaagctcactgccttgtggaggagttgagaaaaccaagggtgggtgactctactctgcgtcattgaccttaacagttacctgt

SEQ ID NO: 2370 - DNA, 101 bp, Homo sapiens
tcttatcagctaaagtccaggaagagattgaacgtgtgattggcagaaacyggagcccctgcatgcaagacaggagccacatgccctacacagatgctgtg

SEQ ID NO: 2371 - DNA, 92 bp, Homo sapiens
cgctgcggaattttgggatggggaagaggagcattgaggacygtgttcaagaggaagcccgctgccttgtggaggagttgagaaaaaccaag

SEQ ID NO: 2372 - DNA, 101 bp, Homo sapiens
gagccacatgccctacacagatgctgtggtgcacgaggtccagagatacaytgaccttctccccaccagcctgccccatgcagtgacctgtgacattaaat

SEQ ID NO: 2373 - DNA, 101 bp, Homo sapiens
catgaacaaccctcaggactttattgattgcttcctgatgaaaatggagaaggtaaaatgtaaacaaaagcttagttatgtgactgcttgtgaatttgtga

SEQ ID NO: 2374 - DNA, 100 bp, Homo sapiens
catgaacaaccctcaggactttattgattgcttcctgatgaaaatggagaggtaaaatgtaaacaaaagcttagttatgtgactgcttgtgaatttgtga

SEQ ID NO: 2375 - DNA, 101 bp, Homo sapiens
taaaaacgttgcttttatgaaaagttatattttggaaaaagtaaaagaacrccaagaatcaatggacatgaacaaccctcaggactttattgattgcttcc

SEQ ID NO: 2376 - DNA, 101 bp, Homo sapiens
tagtctggggtgatcctggcttgacaagaggccctgaccctccctctgcasttgcggcgccgcttcggggacgtgttcagcctgcagctggcctggacgcc

SEQ ID NO: 2377 - DNA, 101 bp, Homo sapiens
gggtgaccgaggaggccgcctgcctttgtgccgccttcgccaaccactccrgtgggtgatgggcagaagggcacaaagcgggaactgggaaggcgggggac

SEQ ID NO: 2378 - DNA, 101 bp, Homo sapiens
gctggtgacccacggcgaggacaccgccgaccgcccgcctgtgcccatcayccagatcctgggtttcgggccgcgttcccaaggcaagcagcggtggggac

SEQ ID NO: 2379 - DNA, 101 bp, Homo sapiens
tggagctcttcctcttcttcacctccctgctgcagcacttcagcttctcggtgcccactggacagccccggcccagccacagccaccatggtgtctttgct

SEQ ID NO: 2380 - DNA, 92 bp, Homo sapiens
tggagctcttcctcttcttcacctccctgctgcagcacttcagcttctcgggacagccccggcccagccacagccaccatggtgtctttgct

SEQ ID NO: 2381 - DNA, 101 bp, Homo sapiens
cactggacagccccggcccagccaccatggtgtctttgctttcctggtgascccatccccctatgagctttgtgctgtgccccgctagaatggggtaccta

SEQ ID NO: 2382 - DNA, 101 bp, Homo sapiens
atcgcttcaccccaggaattcaagaccagcctggacaacttggaagaaccsggtctctacaaaaaatacaaaattagctgggattgggtgcggtggctcat

SEQ ID NO: 2383 - DNA, 104 bp, Homo sapiens
ctaactgagcacaggatgacctgggacccagcccagcccccccgagacctgactgaggccttcctggcagagatggagaaggtgagagtggctgccacggtggg

SEQ ID NO: 2384 - DNA, 100 bp, Homo sapiens
ctaactgagcacaggatgacctgggacccagcccagcccccccgagacctgaggccttcctggcagagatggagaaggtgagagtggctgccacggtggg

SEQ ID NO: 2385 - DNA, 101 bp, Homo sapiens
gaaggcgggggacggggaaggcgaccccttacccgcatctcccacccccargacgcccctttcgccccaacggtctcttggacaaagccgtgagcaacgtg

SEQ ID NO: 2386 - DNA, 103 bp, Homo sapiens
gatgggtgaccaggctcacatgccctacaccactgccgtgattcatgaggtggtcagcgctttggggacatcgtccccctgggtgtgacccatatgacatccc

SEQ ID NO: 2387 - DNA, 101 bp, Homo sapiens
gatgggtgaccaggctcacatgccctacaccactgccgtgattcatgaggtgcagcgctttggggacatcgtccccctgggtgtgacccatatgacatccc

SEQ ID NO: 2388 - DNA, 101 bp, Homo sapiens
ccgtgtccaccttgcgcaacttgggcctgggcaagaagtcgctggagcagtgggtgaccgaggaggccgcctgcctttgtgccgccttcgccaaccactcc

SEQ ID NO: 2389 - DNA, 100 bp, Homo sapiens
ccgtgtccaccttgcgcaacttgggcctgggcaagaagtcgctggagcaggggtgaccgaggaggccgcctgcctttgtgccgccttcgccaaccactcc

SEQ ID NO: 2390 - DNA, 103 bp, Homo sapiens
cccagcccagcccccccgagacctgactgaggccttcctggcagagatggagaaggtgagagtggctgccacggtggggggcaagggtggtgggttgagcgtc

SEQ ID NO: 2391 - DNA, 100 bp, Homo sapiens
cccagcccagcccccccgagacctgactgaggccttcctggcagagatggaggtgagagtggctgccacggtggggggcaagggtggtgggttgagcgtc

SEQ ID NO: 2392 - DNA, 101 bp, Homo sapiens
tgattatgtcaagtggccaggcatggaaggagcaaagaaggttcactctgrcagcactaaggaactttggtttaggaaagaagagcttagaggaacgcatt

SEQ ID NO: 2393 - DNA, 101 bp, Homo sapiens
acagccttttgaccctcatttcaagatcaacaatgcagtttccaatatcawttgctccatcaccttcggagaacgctttgagtaccaggatagttggtttc

SEQ ID NO: 2394 - DNA, 101 bp, Homo sapiens
cgcagggtgctgcgaaggggcgggctgggaggcggggcacggctgggagckaggcggggcggggaccgtcgcctgctgggaccgccgcctgcttggaccgc

SEQ ID NO: 2395 - DNA, 101 bp, Homo sapiens
gatctgatttacctaaaatgtctttcctctcctttcagctctgtccgatcyggagctcgtggcccaatcaattatctttatttttgctggctatgaaacca

SEQ ID NO: 2396 - DNA, 101 bp, Homo sapiens
ctactgtcatttctaaccataatctctttaaagagctcttttgtctttcartatctcttccctgtttggaccacattacccttcatcatatgaagccttgg

SEQ ID NO: 2397 - DNA, 101 bp, Homo sapiens
atcagctccgttgtccccacacagaacgtatgaaggtcaactccctgtgckggccatcacagatcccgacgtgatcagaacagtgctagtgaaagaatgtt

SEQ ID NO: 2398 - DNA, 101 bp, Homo sapiens
aacatcgactctctcaacaatccacaagacccctttgtggagagcactaaraagttcctaaaatttggtttcttagatccattatttctctcaataagtat

SEQ ID NO: 2399 - DNA, 101 bp, Homo sapiens
aactggccactcaccctgatgtccagcagaaactgcaaaaggagattgatrcagttttgcccaataaggtgaggggatgacccctggagatgaagggaaga

SEQ ID NO: 2400 - DNA, 101 bp, Homo sapiens
catattggtgtcaaagtgtcactgaactaaaggctgactttccagacaacrtaagtgtgatttaacatctaaaacaagagaattggcataagttggtgaat

SEQ ID NO: 2401 - DNA, 104 bp, Homo sapiens
gtgcagatgccccgtgtcagaagagctgtccaactaatcttgatattaaatcattcatcacaagtattgcaaacaaggtaaattcagatttaactctgcaaatg

SEQ ID NO: 2402 - DNA, 100 bp, Homo sapiens
gtgcagatgccccgtgtcagaagagctgtccaactaatcttgatattaaatcatcacaagtattgcaaacaaggtaaattcagatttaactctgcaaatg

SEQ ID NO: 2403 - DNA, 101 bp, Homo sapiens
tgtgttttccttttagaaactgccaagttttggaccttatctggaacagcrcaagaaaatcatagcagaaaacaagattagactgaaagaacaaaatgtag

SEQ ID NO: 2404 - DNA, 101 bp, Homo sapiens
caaaagcagaaacaatgagatcattttatttaaaggagtatttcctcctcyacttgagaagtcaaccatagcagtgattggctttgtccagtcccttgggg

SEQ ID NO: 2405 - DNA, 101 bp, Homo sapiens
ttaattacctatgttagaaaaagacagaagaagtatgaaaaaaaattgctrtcactatctcagtagcctgatggtttttcttcacattcctcaggtattct

SEQ ID NO: 2406 - DNA, 101 bp, Homo sapiens
tgaattattttcttcttcagggtataaatcttagtgggggtcagaagcagyggatcagcctggccagagctacctaccaaaatttagacatctatcttcta

SEQ ID NO: 2407 - DNA, 101 bp, Homo sapiens
cttctattggctgcagcataggccagaggcagctgctgtgcctgggcaggrctctgcttcggaaatccaagatcctggtcctggatgaggccactgctgcg

SEQ ID NO: 2408 - DNA, 101 bp, Homo sapiens
ccatggacttaggcttagaggccatttttgatcaagttgtgagaagaaatyggggtggatggtgtctccaggtcaatcatcttctgtactgggctctgacc

SEQ ID NO: 2409 - DNA, 101 bp, Homo sapiens
ggtgggcttcaccctcacccataggagattcaattataaggacaatacagwtctaatagagttcaagactctgagtgaggaagaaatagaaaaagtgctga

SEQ ID NO: 2410 - DNA, 101 bp, Homo sapiens
gcttgtgcccaaacatggtgatagattttttactatttagaataaggagtraaacaatcttgtctatttgtcatccagctcaccagttatcaactgacgac

SEQ ID NO: 2411 - DNA, 99 bp, Homo sapiens
cttccgtttgacggaagagaatggattctggtatctagaccaaatcagaasaacagtacattccaaatgaagaatttcttcattctgatctcctagaag

SEQ ID NO: 2412 - DNA, 101 bp, Homo sapiens
atccacttgtttaattaatcaaattttatcactcaatagagcatcacctgrgatagtgggaaaaggtaagaattaatattgacagtaaaaagtcttctaaa

SEQ ID NO: 2413 - DNA, 101 bp, Homo sapiens
tttatatattatattaatttatgccatgaagaaaaaatatcaagagaaagrtatcaatgcatcagaaaatggaagtgtcatggatgaagcaaacttagaat

SEQ ID NO: 2414 - DNA, 101 bp, Homo sapiens
cctgtatgttatgtttgtgcttttgacgttgttacaagtaagcagctataytggtgcttttacttatgtcttcaaatacgtagagcaacagtatggtcagc

SEQ ID NO: 2415 - DNA, 101 bp, Homo sapiens
actatacagtgccaggcctggggcccgcgggcgaggccttccttggccagygcaggcgctatgaagtggactggaaccagagcgccctcagctgtgtagac

SEQ ID NO: 2416 - DNA, 101 bp, Homo sapiens
tggtcgaaatcccgggggccttcatagccctcatcaccattgaccgcgtgrgccgcatctaccccatggccatgtcaaatttgttggcgggggcagcctgc

SEQ ID NO: 2417 - DNA, 101 bp, Homo sapiens
tcacacctgaccaccactgccagagtcctggggtggctgagctgagccagygctgtggctggagccctgcggaggagctgaactatacagtgccaggcctg

SEQ ID NO: 2418 - DNA, 101 bp, Homo sapiens
gagaacattgcctatggagacaacagccgggtggtgtcacaggaagagatygtgagggcagcaaaggaggccaacatacatgccttcatcgagtcactgcc

SEQ ID NO: 2419 - DNA, 101 bp, Homo sapiens
ggctgggagggatgagagtaggatgatacatggtggtgtctggcaggaggygggcaaggatgactatgtgaaggcactgcccgggcaactgaagccttttg

SEQ ID NO: 2420 - DNA, 101 bp, Homo sapiens
tggtgattctgacatgtgttctttgctctaaggaaatggccccagcccagycaggtccccaggaggttttcctacaagtcttgaatctggcagatgatgag

SEQ ID NO: 2421 - DNA, 101 bp, Homo sapiens
tctggtcgagtttaaaactctcactgaggaagaggttgaagaagtgctgaraaatatatttaagatttccttggggagaaatctcgtgcccaaacctggtg

SEQ ID NO: 2422 - DNA, 101 bp, Homo sapiens
ctcaggtgccttgcattttctgcttgacagaagagagaggaatctggtacytggaccaaatcaggagagagcagtatattacaaacaaagaatttcttaat

SEQ ID NO: 2423 - DNA, 101 bp, Homo sapiens
tatatttaagatttccttggggagaaatctcgtgcccaaacctggtgatgratcccttactatttagaataaggaacaaaataaacccttgtgtatgtatc

SEQ ID NO: 2424 - DNA, 101 bp, Homo sapiens
cctgatgtcattcttcatagtattttaacatgttactctttcttgtttcargtaaaatatgcaatatacgttgtcttgagaaggttgatgcttttgaagaa

SEQ ID NO: 2425 - DNA, 101 bp, Homo sapiens
catggagttgggcttagaggctatttttgatcacattgtaagaagaaaccrgggtgggtggtgtctccaggtcaatcaacttctgtactgggctctgacca

SEQ ID NO: 2426 - DNA, 101 bp, Homo sapiens
tgaaaatgttgtctggacaagcactgaaagataagaaagaactagaaggtdctgggaaggtgagtcaaactaaatatgattgattaattaagtagagtaaa

SEQ ID NO: 2427 - DNA, 101 bp, Homo sapiens
tatgactttatcatgaaactgcctcatgtaagttgtccttgccctttgccyttctagaggtgcaaaaaataaaatgcaggcctactatgcaggaagttagg

SEQ ID NO: 2428 - DNA, 101 bp, Homo sapiens
cttatctttaggcattgaccctatccaacttggccaggaaggagtacaccrttggagaaacagtgaacctgatgtctgtggatgcccagaagctcatggat

SEQ ID NO: 2429 - DNA, 101 bp, Homo sapiens
tcaagccataagatgtttctgcatttccaacttactggatatttctcagcygcccagtctagccagtgctgtcgctttggaatgtctccagaacggttctt

SEQ ID NO: 2430 - DNA, 101 bp, Homo sapiens
ttgattaattaaacaagtggataaggtcgatgttgaattttctgatgaatygatattagtttctttagaatacctgtaactgtaagaacatcactgaatta

SEQ ID NO: 2431 - DNA, 81 bp, Homo sapiens
gcggtagagattgacgatggtctcaaggacggcgcgcaggkgaaggggggtgttggcgatggctgcgcccaggaacaaggt

SEQ ID NO: 2432 - DNA, 101 bp, Homo sapiens
actgtgtgacctcctatctggctgactgtgagactcagctgtctcaggccmcaaggcagggcctgctctatggcgtccctgtgagcctcaaggagtgcttc

SEQ ID NO: 2433 - DNA, 101 bp, Homo sapiens
tatctacataggttgtttaaaggaatctgggtcatacatgtggatatatgygttcatgggtaatatgcttcgtggaataggggagactcccatagtaccat

SEQ ID NO: 2434 - DNA, 101 bp, Homo sapiens
ttaatttctgggaaggatcagcctcaggtgccttgtgtcttccgtttgacrgaagagaatggattctggtatctagaccaaatcagaagggaacagtacat

SEQ ID NO: 2435 - DNA, 101 bp, Homo sapiens
ttccaaatgaagaatttcttcattctgatctcctagaagacagcaaatacygaaaaatctactcctttactcttaagcctcgaacaattgaagattttgag

SEQ ID NO: 2436 - DNA, 101 bp, Homo sapiens
agtagagttgcagaacttctccagcatgattcctggactgcgtctggaacraagactcttctattaatatgattgtgttgtttcttctttacttgtttcat

SEQ ID NO: 2437 - DNA, 81 bp, Homo sapiens
gctgctgagctccctggtgtctctcgctggttctgtctacytggcctggatcctgttcttcgtgctctatgatttctgcat

SEQ ID NO: 2438 - DNA, 81 bp, Homo sapiens
ggtgatccacacagctgacagccagctagctgctcatcacsgagcgtcctgcgggtggggatgtggggaggtaactaacag

SEQ ID NO: 2439 - DNA, 101 bp, Homo sapiens
ctgtgtacggataagtactgttcttttccctcttagatctacaatggctamaaattattatctcatgcttgggaagaatggggatcacaatggcctatgag

SEQ ID NO: 2440 - DNA, 81 bp, Homo sapiens
gggctatcctctgttccccgacctcccatcctagtccaagrgtcgatgatctcctggcaccgggcacctttggccacgtca

SEQ ID NO: 2441 - DNA, 101 bp, Homo sapiens
tttctggtaggacaaatattggcaaatttgacatgatttgggatagaggarcattagttgccatcaatccaggtgatcgcaaatggtaagtaatttttctt

SEQ ID NO: 2442 - DNA, 101 bp, Homo sapiens
taagcacgcaatgaacagtcatagtaagctggccaagggtagagttcagtktgaacaaagcaatttgagaacatcaaaggaagtttggggaacagcaaggg

SEQ ID NO: 2443 - DNA, 101 bp, Homo sapiens
actctgaaacatggcctgtttgggagtgcgggattcaaaggtggtcccacsgctgcccctactgcaaatggcagttttaatcttatcttttggcttctgca

SEQ ID NO: 2444 - DNA, 101 bp, Homo sapiens
catgctcattgccttttcacagaactttctgtgcgacgtggtttattcccmgtatgcaacccttgcctcagaattccttcagagagaggtgactgtccagg

SEQ ID NO: 2445 - DNA, 88 bp, Homo sapiens
ggggcaagcagaagggctagagaggaggaatgagcttrgacaggtgggctggggtctatcccagagttttgagagcaaggcagaggac

SEQ ID NO: 2446 - DNA, 101 bp, Homo sapiens; identical to SEQ ID NO: 1583

SEQ ID NO: 2447 - DNA, 89 bp, Homo sapiens
gggcaccgccatcagctgttcgcgcgtcttctcctccrggtgtgcacgggagtgggaggcgtggggcctcggagcagggcggccaggat

SEQ ID NO: 2448 - DNA, 71 bp, Homo sapiens
cccgggaccgggattaccgcgcgctctgcgacgygggcaccgccatcagctgttcgcgcgtcttctcctcc

SEQ ID NO: 2449 - DNA, 99 bp, Homo sapiens
gctggagtgcagtggtgcgatcttggctcaccgcaacctccgcctctcrgattcaagcaattgtcatgccccagcttcccgagtagctggaattacagg

SEQ ID NO: 2450 - DNA, 99 bp, Homo sapiens
cctttccagctctcagattctgtgatgctcaaagggtgagctctgtgggcmcaggacgcatggtagatggagcttagtctttctggtatccagctggga

SEQ ID NO: 2451 - DNA, 101 bp, Homo sapiens
tggaagctagtggggacagaaagacggggagcctgggctaggtgtaggggkcctgagttccgggctttgctacccagctcttgacttctgtttcccgattt

SEQ ID NO: 2452 - DNA, 101 bp, Homo sapiens
gtccttcccttcccatcctctctctgcaaccccagctctatgagatgttcycttcggtgatgaaacacctgccaggaccacagcaacaggcctttcagttg

SEQ ID NO: 2453 - DNA, 101 bp, Homo sapiens
caagtcctcccagtcacctaaggacaytgacgtgtcccccaracacgtggkctttgccacgatcccackaaactacaccatgagcttcctgccccgctgag

SEQ ID NO: 2454 - DNA, 101 bp, Homo sapiens
caccgtcatgcagaacttccgcctcaagtcctcccagtcacctaaggacaytgacgtgtcccccaracacgtggkctttgccacgatcccackaaactaca

SEQ ID NO: 2455 - DNA, 101 bp, Homo sapiens
tgaggtaattatgtaatcagccaaagtccatccctctttttcaggcagtakaaaggcaaaccaccccagccgtcaccatctatcatcccactaccaccatg

SEQ ID NO: 2456 - DNA, 101 bp, Homo sapiens
gcttcggcgattctctgtgaccactatgagggacttcgggatgggaaagcrgagtgtggaggagcggattcaggaggaggctcagtgtctgatagaggagc

SEQ ID NO: 2457 - DNA, 101 bp, Homo sapiens
ggaaagggaggagagaacatgaggaaggaaagaaagatgaggtgaaaggarggagaaaatagggaggaggaactgagacagggagagaggggaggtgggaa

SEQ ID NO: 2458 - DNA, 101 bp, Homo sapiens
agaacagaaaagaacctacgtggaatattgggggtgaattttgcccgatayctggctgaatttcccctgataatgccactctctatgtccatgtgtacaca

SEQ ID NO: 2459 - DNA, 101 bp, Homo sapiens
agataggtgacagcctgatgttccccaggcacttcagtctgtgtccttgayctgctgcttcttcctaggggccctcatggaccccaccttcctcttccagt

SEQ ID NO: 2460 - DNA, 101 bp, Homo sapiens
aggtgcttcggcgattctctgtgaccactatgagggacttcgggatgggaragcggagtgtggaggagcggattcaggaggaggctcagtgtctgatagag

SEQ ID NO: 2461 - DNA, 101 bp, Homo sapiens
tgttttctcttagatatgcaataattttcccactatcattgattatttccygggaacccataacaaattacttaaaaaccttgcttttatggaaagtgata

SEQ ID NO: 2462 - DNA, 101 bp, Homo sapiens
ctgtgctacatgacaacaaagaatttcccaacccagagatgtttgaccctygtcactttctggatgaaggtggaaattttaagaaaagtaactacttcatg

SEQ ID NO: 2463 - DNA, 101 bp, Homo sapiens
gttttctcttagatatgcaataattttcccactatcattgattatttcccrggaacccataacaaattacttaaaaaccttgcttttatggaaagtgatat

SEQ ID NO: 2464 - DNA, 101 bp, Homo sapiens
aagcttggagtgcaagctcacggttgtcttaacaagaggagaaggcttcartggatccttttgtggtccttgtgctctgtctctcatgtttgcttctcctt

SEQ ID NO: 2465 - DNA, 101 bp, Homo sapiens
caatggaaagagatggaaggagatccggcgtttctccctcatgacgctgcrgaattttgggatggggaagaggagcattgaggaccgtgttcaagaggaag

SEQ ID NO: 2466 - DNA, 101 bp, Homo sapiens
tagtttcgtttctcttcctgttaggaatcgttttcagcaatggaaagagayggaaggagatccggcgtttctccctcatgacgctgcggaattttgggatg

SEQ ID NO: 2467 - DNA, 101 bp, Homo sapiens
aagcatcactggatgttaacaatcctcgggactttatcgattgcttcctgwtcaaaatggagcaggtaagatattagcaacagatcagtattttgatttct

SEQ ID NO: 2468 - DNA, 101 bp, Homo sapiens
gatccggcgtttctccctcacaaccttgcggaattttgggatggggaagargagcattgaggaccgtgttcaagaggaagctcactgccttgtggaggagt

SEQ ID NO: 2469 - DNA, 101 bp, Homo sapiens
ggacatgaacaaccctcaggactttattgattgcttcctgatgaaaatggrgaaggtaaaatgtaaacaaaagcttagttatgtgactgcttgtgaatttg

SEQ ID NO: 2470 - DNA, 101 bp, Homo sapiens
ttgtcaatggatttgcctctgtgccgcccttctaccagctgtgcttcattyctgtctgaagaagagcagatggcctggctgctgctgtgcagtccctgcag

SEQ ID NO: 2471 - DNA, 99 bp, Homo sapiens
agccacatgccctacacagatgctgtggtgcacgaggtccagagatacmttgaccttctccccaccagcctgccccatgcagtgacctgtgacattaaa

SEQ ID NO: 2472 - DNA, 101 bp, Homo sapiens
cacatgccctacacagatgctgtggtgcacgaggtccagagatacattgascttctccccaccagcctgccccatgcagtgacctgtgacattaaattcag

SEQ ID NO: 2473 - DNA, 101 bp, Homo sapiens
ttttgggatggggaagaggagcattgaggaccgtgttcaagaggaagcccrctgccttgtggaggagttgagaaaaaccaagggtgggtgaccctactcca

SEQ ID NO: 2474 - DNA, 100 bp, Homo sapiens
tgctcctggtggacctgatgcaccggcgccaacgctgggctgcacgctacycaccaggccccctgccactgcccgggctgggcaacctgctgcatgtgga

SEQ ID NO: 2475 - DNA, 100 bp, Homo sapiens
ggcgccaacgctgggctgcacgctacccaccaggccccctgccactgcccrggctgggcaacctgctgcatgtggacttccagaacacaccatactgctt

SEQ ID NO: 2476 - DNA, 101 bp, Homo sapiens
gctgcacgctacccaccaggccccctgccactgcccgggctgggcaaccttgctgcatgtggacttccagaacacaccatactgcttcgaccaggtgaggg

SEQ ID NO: 2477 - DNA, 100 bp, Homo sapiens
gctgcacgctacccaccaggccccctgccactgcccgggctgggcaacctgctgcatgtggacttccagaacacaccatactgcttcgaccaggtgaggg

SEQ ID NO: 2478 - DNA, 101 bp, Homo sapiens
ctgctcaggccaaggggaaccctgagagcagcttcaatgatgagaacctgygcatagtggtggctgacctgttctctgccgggatggtgaccacctcgacc

SEQ ID NO: 2479 - DNA, 104 bp, Homo sapiens
aaggtcctacgcttccaaaaggctttcctgacccagctggatgagctgctaactgagcacaggatgacctgggacccagcccagcccccccgagacctgactga

SEQ ID NO: 2480 - DNA, 100 bp, Homo sapiens
aaggtcctacgcttccaaaaggctttcctgacccagctggatgagctgctgagcacaggatgacctgggacccagcccagcccccccgagacctgactga

SEQ ID NO: 2481 - DNA, 102 bp, Homo sapiens
atgagctgctaactgagcacaggatgacctgggacccagcccagccccccccgagacctgactgaggccttcctggcagagatggagaaggtgagagtggct

SEQ ID NO: 2482 - DNA, 101 bp, Homo sapiens
atgagctgctaactgagcacaggatgacctgggacccagcccagcccccccgagacctgactgaggccttcctggcagagatggagaaggtgagagtggct

SEQ ID NO: 2483 - DNA, 121 bp, Homo sapiens
cagaggagcccatttggtagtgaggcaggtatggggctagaagcactggtgcccctggccrtgatagtggccatcttcctgctcctggtggacctgatgcaccggcgccaacgctgggctg

SEQ ID NO: 2484 - DNA, 101 bp, Homo sapiens
gcttccaaaaggctttcctgacccagctggatgagctgctaactgagcacaggatgacctgggacccagcccagcccccccgagacctgactgaggccttc

SEQ ID NO: 2485 - DNA, 100 bp, Homo sapiens
gcttccaaaaggctttcctgacccagctggatgagctgctaactgagcacggatgacctgggacccagcccagcccccccgagacctgactgaggccttc

SEQ ID NO: 2486 - DNA, 101 bp, Homo sapiens
cggatgtgcagcgtgagcccatctgggaaacagtgcaggggccgagggagraagggtacaggcgggggcccatgaactttgctgggacacccggggctcca

SEQ ID NO: 2487 - DNA, 101 bp, Homo sapiens
cacgctggcctggggcctcctgctcatgatcctacatccggatgtgcagcstgagcccatctgggaaacagtgcaggggccgagggaggaagggtacaggc

SEQ ID NO: 2488 - DNA, 101 bp, Homo sapiens
ggtgaccacctcgaccacgctggcctggggcctcctgctcatgatcctacmtccggatgtgcagcgtgagcccatctgggaaacagtgcaggggccgaggg

SEQ ID NO: 2489 - DNA, 101 bp, Homo sapiens
gttggcccagcgcttcgggccggtgttcacgctgtacgtgggctcgcagcrcatggtggtgatgcacggctacaaggcggtgaaggaagcgctgctggact

SEQ ID NO: 2490 - DNA, 101 bp, Homo sapiens
ctctgacagcactaaggaactttggtttaggaaagaagagcttagaggaaygcattcaggaggaggcccaacacctcactgaagcaataaaagaggagaac

SEQ ID NO: 2491 - DNA, 101 bp, Homo sapiens
agccttgcctgagtctctgctgctttctctagggtaccatgatcctgaccwatttgacggcgctgcacagggaccccacagagtgggccacccctgacaca

SEQ ID NO: 2492 - DNA, 101 bp, Homo sapiens
actcagcgtctttggggcctacagcatggatgtgatcactagcacatcatytggagtgaacatygactctctcaacaatccacaagacccctttgtggaaa

SEQ ID NO: 2493 - DNA, 101 bp, Homo sapiens
catatacacaccctttggaactggacccagaaactgcattggcatgaggtytgctctcatgaacatgaaacttgctctaatcagagtccttcagaacttct

SEQ ID NO: 2494 - DNA, 101 bp, Homo sapiens
atccctgtgacctgatttctgtttcactttgtagatatgggacccgtacayatggactttttaagagactgggaattccagggcccacacctctgcctttg

SEQ ID NO: 2495 - DNA, 101 bp, Homo sapiens
gatccccttgaaattagacacgcaaggacttcttcaaccagaaaaacccaytgttctaaaggtggattcaagagatggaaccctaagtggagaatgagtta

SEQ ID NO: 2496 - DNA, 101 bp, Homo sapiens
gtcacaatccctgtgacctgatttctgtttcactttgtagatatgggaccygtacacatggactttttaagagactgggaattccagggcccacacctctg

SEQ ID NO: 2497 - DNA, 101 bp, Homo sapiens
acctgcccaccataaccgacacttgtacaggctgtactctgtgtctcagtktttgccctattgtcgactgcatcaaaatggtttccaggacaacaccttat

SEQ ID NO: 2498 - DNA, 101 bp, Homo sapiens
aaacggctgcatattggtgtcaaagtgtcactgaactaaaggctgacttyccagacaacgtaagtgtgatttaacatctaaaacaagagaattggcataag

SEQ ID NO: 2499 - DNA, 100 bp, Homo sapiens
aaacggctgcatattggtgtcaaagtgtcactgaactaaaggctgacttycagacaacgtaagtgtgatttaacatctaaaacaagagaattggcataag

SEQ ID NO: 2500 - DNA, 101 bp, Homo sapiens
cctgtttttctttctcctttcttttcagtacttctgaaattcctcagttcyggctgccgtatgatgtagtgaattttgagattgagctaatgaaggacctt

SEQ ID NO: 2501 - DNA, 101 bp, Homo sapiens
aacatcctgattttgcaactactggccagtgggatgttaccactgaaaggsatggtaaaaaagaatcggctgtctttgatgctgtaatggtttgttccgga

SEQ ID NO: 2502 - DNA, 101 bp, Homo sapiens
acctcaaagcgggagatgaagtccttcagatttgggaaggcgtccaagcasttgggctcaaatatacggtggaggtcaaggacatcatagacgagaaaatc

SEQ ID NO: 2503 - DNA, 101 bp, Homo sapiens
aaggggaccgcaatggaggagcaaagaagaagaacttttttaaactgaacrataaaaggtaactagcttgtttcattttcatagtttacatagttgcgaga

SEQ ID NO: 2504 - DNA, 101 bp, Homo sapiens
cagagctacctaccaaaatttagacatctatcttctagatgaccccctgtytgcagtggatgctcatgtaggaaaacatatttttaataaggtcttgggcc

SEQ ID NO: 2505 - DNA, 101 bp, Homo sapiens
tccaaatgaagaatttcttcattctgatctcctagaagacagcaaataccraaaaatctactcctttactcttaagcctcgaacaattgaagattttgagt

SEQ ID NO: 2506 - DNA, 101 bp, Homo sapiens
ggaacaaattggacttggaaacattaactgacattcttcaacaccagatcygagctgttccctttgagaaccttaacatccattgtggggatgccatggac

SEQ ID NO: 2507 - DNA, 101 bp, Homo sapiens
aaccttttcaaataataataataataataataaaaaatgtattttaaagatggcctgtggttatcttggaaattggtgatttatgctagaaagcttttaat

SEQ ID NO: 2508 - DNA, 100 bp, Homo sapiens
aaccttttcaaataataataataataataataaaaaatgtattttaaagaggcctgtggttatcttggaaattggtgatttatgctagaaagcttttaat

SEQ ID NO: 2509 - DNA, 100 bp, Homo sapiens
atacagcactggcatgattcaccttctcctgcaggtgaccattgatggcasaactacattgtcgatgctgggtttggacgctcataccagatgtggcagc

SEQ ID NO: 2510 - DNA, 101 bp, Homo sapiens
atatcaagagaaagatatcaatgcatcagaaaatggaagtgtcatggatgragcaaacttagaatccttaaataaaaataaacattttgtcccttctgctg

SEQ ID NO: 2511 - DNA, 101 bp, Homo sapiens
gctgtatcaacataattttgttccctttctaggaaatttgcttgtgattgyatttgtgagttactttggatccaaactacatagaccaaagttaattggaa

SEQ ID NO: 2512 - DNA, 101 bp, Homo sapiens
aacggagatttgagatatcctcttctcttgttggttttattgacggaagcyttgaaattggtaacatttattttctattttaataaccaaacttgcaaagt

SEQ ID NO: 2513 - DNA, 101 bp, Homo sapiens
accagtctgtggaaacaatggaataacttacatctcaccctgtctagcagsttgcaaatcttcaagtggcaataaaaagcctatagtgagtattagttttt

SEQ ID NO: 2514 - DNA, 101 bp, Homo sapiens
gctcttccgcctgctgcagggcctggtcagcaagggcaactggatggctgkctacaccctaagtaattatcatggggatgaggccaggtctcagggtagaa

SEQ ID NO: 2515 - DNA, 101 bp, Homo sapiens
aatcacagaattatcgtattttttgtcctttgtattttatcaggaacctcrgagtgatggtgtgttcctccctgtgtgacataggtgggataatcaccccc

SEQ ID NO: 2516 - DNA, 101 bp, Homo sapiens
gctctgaccacaatcggttttcagaccacaatgttaggagggtatttttayatccctccagttaacaaatacagcactggcatggttcaccttctcctgca

SEQ ID NO: 2517 - DNA, 101 bp, Homo sapiens
tgaattgccttgaagtttttttctcactcgtcctggtagatcttgaagggyctgaacctgaaggtgcagagtgggcagacggtggccctggttggaaacag

SEQ ID NO: 2518 - DNA, 101 bp, Homo sapiens
tgaagaacgacataaaagttggggaattgactgtctttttgaaaagttatrtctacttacagaaaagtaaatgagacatagataaaataaaatcacactga

SEQ ID NO: 2519 - DNA, 101 bp, Homo sapiens
tgttactgatttttactttcctctgttgtaggtaaaggatacagaaagcaraacaaccaatgggatgacaaccgtgaggtttgaatgtcaatgagattcca

SEQ ID NO: 2520 - DNA, 101 bp, Homo sapiens
ccctggtggacatggtgaatgacggcgtggaggacctccgctgcaaatacrtctccctcatctacaccaactatgtgagcatctgcaccagggttgggcac

SEQ ID NO: 2521 - DNA, 101 bp, Homo sapiens
cctgccaaagaagaaacaccaaaaaatatacttatttacgcttgaacctcraacaattgaagattttgagtctatgaatacatacctgcagacgtctccaa

SEQ ID NO: 2522 - DNA, 101 bp, Homo sapiens
gtcatttgaaaacataatttaagtgtaaatgtatgattttatgcaggtttscagaccggggacacagtgtagttggtgtggaaatcagtgaacttgggata

SEQ ID NO: 2523 - DNA, 101 bp, Homo sapiens
tttagagtatcctggctttaaatcctcgaacacaaactcatgcaactctgygttccacttcggccaagaaattagacaagaaacattggaaaagaaatcct

SEQ ID NO: 2524 - DNA, 101 bp, Homo sapiens
agttaacaaatacagcactggcatggttcaccttctcctgcaggtgaccaytgacggcaggaattacattgtcgatgctgggtctggaagctcctcccaga

SEQ ID NO: 2525 - DNA, 101 bp, Homo sapiens
tgaagcctgagtgtgtccagcagctgctggtttgctcccaggaggccaagmagtcagcctactgcccctacagtcactttcctgtgggggctgccctgctc

SEQ ID NO: 2526 - DNA, 101 bp, Homo sapiens
cagacgataaatgacaaagtcaaacaacgggatgaagataagaaccagaargggatttagaacctgtaacaccatgataaaaaggattagctacaaatatt

SEQ ID NO: 2527 - DNA, 101 bp, Homo sapiens
ggatgtcaccgaaaagctgagcccttcatttgcagacctgttccgcacgcygcgcctgaggaagcgcaccttcatcctgatgtacctgtggtgaggggcgt

SEQ ID NO: 2528 - DNA, 101 bp, Homo sapiens
aaccctactggtcttctctcccaccagtgcccaccctgggctggagctgtytccaagctgcatggaggcctgctcctgcccattggacggctttaaccctg

SEQ ID NO: 2529 - DNA, 81 bp, Homo sapiens
cagctccagagaaggcatcactgagggaggcccagcaccayggtcctggctgacacatggttcagacttggccgatttatt

SEQ ID NO: 2530 - DNA, 101 bp, Homo sapiens
ctggggtggcttacgcacttcctcactggaggtggttgcagttcacagttkctctgcccaacttcttcttcttgctctattactggtaagtccatttggaa

SEQ ID NO: 2531 - DNA, 101 bp, Homo sapiens
ggcctcccatccaggccttccttcactccacctaccttctccatgctaccratgtcacaagtgatccctctgaggaccagatccagctcaggtcggtaccg

SEQ ID NO: 2532 - DNA, 101 bp, Homo sapiens
gaacaattgaagattttgagtctatgaatacatacctgcagacatctccakcatctgtgtttactagtaaatcattttgttccttgcagaccccagatggg

SEQ ID NO: 2533 - DNA, 101 bp, Homo sapiens
ggcagcctctggagttaatttctgggaaggatcagcctcaggtgccttgtrtcttccgtttgacggaagagaatggattctggtatctagaccaaatcaga

SEQ ID NO: 2534 - DNA, 101 bp, Homo sapiens
aagatcctaaactggctgtgagactctatttcggaccctgcaactcctatyagtatcgcctggttgggcctgggcaatgggaaggagccagaaatgccatc

SEQ ID NO: 2535 - DNA, 81 bp, Homo sapiens
tcacgcctgtaatcccagcactttaggaagccaaggagggyggatcatgaggtcaggagtttgagaccagcctggccaata

SEQ ID NO: 2536 - DNA, 81 bp, Homo sapiens
atgtggggcttctagattaccccctcctcctgccatacccrcacatgacaatggaccaaatgtgccacacgctcgctcttt

SEQ ID NO: 2537 - DNA, 101 bp, Homo sapiens
ctgccctggttgaattcccagctgccttcatgatcatcctcaccatcgacygcatcggacgccgttacccttgggctgcatcaaatatggttgcaggggca

SEQ ID NO: 2538 - DNA, 81 bp, Homo sapiens
gaagtcaagcaagagaagacctgaaaaacaaccattggccrggtgcggtggctcacgcctataatcctagcattttgggag

SEQ ID NO: 2539 - DNA, 101 bp, Homo sapiens
ttggacctattccagtcatcagtgaatgtaggattctttattggctctatragtatcggctacatagcagacaggtaggttgaatcacctgtggtggaatt

SEQ ID NO: 2540 - DNA, 101 bp, Homo sapiens
gtattttaacatgttactctttcttgtttcaggtaaaatatgcaatatacrttgtcttgagaaggttgatgcttttgaagaacgacataaaagttggggaa

SEQ ID NO: 2541 - DNA, 101 bp, Homo sapiens
aatagactcgctagtcagtaaagatatttgaatatgtatcgtgccccctcyggtgtctttgatcaggatgacatgtgccatttttcagaggacgtgcagac

SEQ ID NO: 2542 - DNA, 101 bp, Homo sapiens
gatggttgcaattgatccttaaccaataatggtcagtcctcatctctgtcstgcttcataggtgccaccttgtgtgtttaaagaagggaagctttgtacct

SEQ ID NO: 2543 - DNA, 118 bp, Homo sapiens
gtcacgtgacacagtcaaacattaacttggtgtatcgattggtttttgccatatatatatatatataagtaggagagggcgaacctctggcaggagcaaaggcgccatggctgtggag

SEQ ID NO: 2544 - DNA, 100 bp, Homo sapiens
gtcacgtgacacagtcaaacattaacttggtgtatcgattggtttttgccgtaggagagggcgaacctctggcaggagcaaaggcgccatggctgtggag

SEQ ID NO: 2545 - DNA, 101 bp, Homo sapiens
cttttcacagaactttctgtgcgacgtggtttattccccgtatgcaacccktgcctcagaattccttcagagagaggtgactgtccaggacctattgagct

SEQ ID NO: 2546 - DNA, 101 bp, Homo sapiens
agggcgcgccacacctgcgccccgcagcccacgacctcacctggtaccagkaccattccttggacgtgattggtttcctcttggccgtcgtgctgacagtg

SEQ ID NO: 2547 - DNA, 67 bp, Homo sapiens
gacgggcttagtgctctcgctctacgcgctgcacktgaaggcggcgcgcgcccgggaccgggattac

SEQ ID NO: 2548 - DNA, 100 bp, Homo sapiens
gtgtctctcgctggttctgtctacctggcctggatcctgttcttcgtgckctatgatttctgcattgtttgtatcaccacctatgctatcaacgtgagcc
